United States Patent Application Publication US 2023/0172999 A1 - sequence listing, part 5

SEQ ID NO: 8 - DNA, 3559485 bp, Coprococcus catus (residues 1-1,779,743 of 3,559,485)
  misc_feature (368422)..(368431): n is a, c, g, or t
  misc_feature (374179)..(374188): n is a, c, g, or t
  misc_feature (396178)..(396187): n is a, c, g, or t
  misc_feature (853083)..(853092): n is a, c, g, or t
  misc_feature (1725383)..(1725494): n is a, c, g, or t
  misc_feature (2422876)..(2422885): n is a, c, g, or t
  misc_feature (2538270)..(2538279): n is a, c, g, or t
  misc_feature (2987512)..(2987521): n is a, c, g, or t
  misc_feature (3011881)..(3012031): n is a, c, g, or t
  misc_feature (3213927)..(3213936): n is a, c, g, or t
  misc_feature (3242409)..(3242530): n is a, c, g, or t
  misc_feature (3421351)..(3421360): n is a, c, g, or t
  misc_feature (3447161)..(3447170): n is a, c, g, or t
  misc_feature (3506976)..(3506985): n is a, c, g, or t
  misc_feature (3510704)..(3510812): n is a, c, g, or t
  misc_feature (3526805)..(3526814): n is a, c, g, or t
ggttacattatttgaaatatttaataaccatgcgtattcatcagaatgtctaagctttgtaaattcttttctgagttctggatctgaaatgaatttgccacctttttcgtaactttctttttccctggccaaagcccagttataagcaaatcttgaagctcctgcgtactgaaacatcttagttttctgtacgttgtttggtatcaacattacttttatggcttttaccatctgtttcctcctgctgcatcaattctcggataagtttcttagctttgttcgctcgttttccttgtaatttgcaactgaatactgtgattatctgaaccagatcttcaacaagttcctgctgttcagatttttcagtattatcaataatctcaatctcacaattataaagtgaagcgatatattctatcaactcaaaaccaaatcgcaatagcctgtctttatataaaacaacaaccttttcaacctgattttgaaagattcgtctgatcaattcctaaagcccttttttcttataattaatcccagaacctatatcacttattatctcaaacggctgcccttttgccagaagatatgtcttgacattatcaatctgtcgttccaaatcatctttttgtttatggcttgaaacgcgacaatatccaattgtaatgcgatttttaggctttacatttattacttggttgagttgctcatcggaataatatctatagccacttactgtagtatgatgcggatgaagttttccattggcatcccaatttcgtaatgtctgagcagatacgcctataatttttgaaaattcatgtatagaataatatttactcaaagtatcaactcctttcaataatattctactctaatatcttataaaactcaaaaagagactgccgtttcagacaatctctttgtattatacccttttcctgccctttccgcaatcgttattatgctcttctgacttcagttttaactgctcatgcgcgtttcgctgcaagtattaatcattatttcagaagaatgatgctctgcggcggcatgtgcagatacacatgggcgcctttttgaggcaggtatttagctgctccgtgttctccgactttggcgactttccaccagatccgctcgccattcggcactctgaaaaagcaataccattcaaagggcagttctgaaacattttccacagtgacgccaataacgtttttcatattctccggtttttctatcagtacgtcgatataatgggcgcggataccgacggcatggatgtcatcagcgaccgtttcgtccacttcaagagtacaatgccaatgcggcacttcgatactgttttcagcaattttgatggcctcagtaatatttttgcagcctgtcagccgggctgcttctctgtatcccggctgatcaaagatgtctttggtgtcaccagtgacaataacccggccctgatccagaatcaacagtctgtcacagaactgataaatttcatctctgctgtgggataccataatcacatccccggcataatcactaagctgtctgatcatatcttccagaagctgctctttcaagaagctgtccagcgctgaaaatggctcatccaacaaaagcatctgaggctcactggcaaggattcgggctaatgctactcgctgctgctgtccgccggataattcattcggcatacgtccgccaagattctgaagggcaaactgttccagaagtctgtcaatttctttcttcttcgcatcaccgcttttcttcatggcaatgccgatattctctgtcactgtcattgtcggaaacaatgcgtactgctgaaaaagatagccaatgtgtcgctctcttgccggcatatcgatcttcgccgcactatcataaacaatccttccgtccacaataactttccctgaatccggcttcaccagacctgcaatcatcttcagcgtcatgctcttacccataccggaaccgccgagaataccaagactgccgccatcatgctcaaaagcaacatccatctggaatcccttaaactttttatgtaattctactgataatgccattttaccacctttgaatcttgctgatgccatgcatggttatgatgttgattgcaaaaataaagacaaaggcaatggtcaccagaacaatcacccagaaaccagccacatcatagttctgtgcactgacttctgcggcgatcgccaccgccatggttctggtctttccaagaatattgcccgccagcatggatgtcgcaccatattcacccaaagctcttgcaaaggttaaaatcgttccagatgcaatgcccggtcccgctaccggaataacaacctttctgaaaatcgtccactctgataagcccagtgtccttcctgcataaatgtaattcacatccacctgctcaaaagctgctcttgcatttcgatacatcaacgggaatgccaccactgtcgccgccagaacacatcccggccaggataaaacaactttaagctgataatgttcccacaggtaaataccaagggggcgcttcaagctgaatataagcagcagcaaaaagccggcaactgtcggcggcagtaccagcggcagattcagaatgccatccagaatactcttggataacggcttcaatttcattgcccatctcgcacaggcaatcccgccaaaaaaagccaccaccgttgctataatcgctgttttcaacgatataagcaacggactcatgttaattgatgcaagaaaatccatatttttcgaatacagctgctgcttcaggtgtcttgagataatcaacaaaagccttagctgctgcaacttcagcatcatctgcttcagtattctttacaagaccaacagggtagataactttggatttaagctctgtatcattggctgttgcgatgacatcaaccttgtctgcaactgaagctgcatctgttgcataaacgataccaacttcattgctgccttcgctgactgcagcaagtacagcacttacgtcttcgcattcattaatctccatcgccattacctgatctgtaataccaaggttgttaaaaatctctcttgcatactggccaacaggaactgtgtcagctgcaagtgcaaggtttgccgcatctgtaatattctcaaaacctgtaacctttgtctctgtaccagccggtttgatcagctgaactttgttttcaagaagatctgtaacatctgcttcctgaacatatccgccttcaacaagtgcattcatctgctttgttgctgctgagaagaatacgtcacaagcgccgccttcttcgatctgtgtctgaagcttgcctgagctgcctgcattgaagacaagatcaacatttggctgaacagatttataattgactgaaatttcatccatggcattgctcaagctggctgcaatatacacctgaacagttgctgcttcgccctcagctgcctgtgtctcagatactgcttctgtggaaactgctgcctctgttgatgctgtcgcttctgttgcctttgttgtttctgtgttcttatttccgcagcctgctaaagctactgcaatcatgcaaagtacaagaacactgcttactaactttttcatttgattcccctcctatataaatagaaaatcttactaacatcagcatactgaatttaaccttaaaagtcaaatagtcgagcaccccaaaaacaatgtgcttgccattttatgtcaactgtattatactctatttatagacagaatcaataaattctataaaaaataccgtacttacggcctttttccagaatttattttatttaaccttaagattattgttcttttcaataaacaggagtttttgtatggaattaaaacagttagaggcctttgtggccgttgttgattataatagcttttctgaagccgcccgccatctttttctgacccagccaacagtcagcgcccatgtggcttcccttgaaaaggaattggataccaagctcatttcccgcaccacaaagaaactgcacgtcacccctcagggatatgatctctatgattctgcagtctccatgctgaaaatccgggatcatattctcaatgaatttgtcggctctcacaaacagattattgaacttggggcatccaccattccatcttcctatgtgcttcctgaagtgctcagtgccttcggtcaattaaacccggatatttattttcattctgaattatctgacagcatgggcattatccagcaggttgaaaacggccgccttgattttggactggtgggaatgaccactgattcatcagagctgatttttatcccttttcttgaggatgagcttgtcatcgtcaccccggttaccccccattacctggagatttccaaaaaaaatgtaaccattgcagcttttttaaatgaaccttttattcttcgtgaaaaaggttccggtacaaaaaaagccatcgaccggtatcttgaacagcagcgtattgcatcgggagccatcaatgttgtagcacgtatgaatgacctggaagcagtcaaacgctccatcattaacggacttggcatctccattctctcagccaaatctgtccaggacctgaatgccagccgacaggttttgattttcccgctggcgcatccggcacccacgcgaaaactttatatcgtatacaagaaggaacatgcactgctcccccatgtcagacgatttatacagtttgtcaggagctattatcagcctcaatgagaaaactcaaccgtaaaaacagatggcgggtctctataacaaacacgttgatttatagagacccgccatctgtttttacggtttcggagtttattggcatattcaggtattgtaaaacgcttttcacttctgttcctgcgctacacagctgtttccacaattttttgtagcgcctccatagacagcccttcaaaaatgatattcgctccatcgaatctctctgcctgctctttgattatttcaataaatgtctcaaatggaacgtatcccagcattttttcctgtgagattgaataaaaataaacttcatatctgtcacattttaaccctttccctgtttccggatcagaaattcccaatggcacctgtccttttagaggaaagattgtccgacaatcctctgtcactacatatctgccgacaacgcccacctcggttctgaaaaactgcggccgcgcataataggcatctacagactgtttttcatgcagccatctgccgaaagcatccacatcgtgtctgaatttttctgcttccggtacaccaaggacgaccgggaacatgacactgtacaatgtcagggattcctttttgccggataaaatatccccacaaacactttcgagaaccgtttcattaaaggcctgcatatccggtatcagcgaaacaagctccgaaagcgcggtgatattgccgtccatctcgatttcacatttccaataagatgcaattctttgtattgcagcgaaaaaatcattcagtccttcacgactgtcagggcttaacgcccgcaaatccacataatcctttttttccggtgtccactcgatactgaaaccgcgggatatatgattcgaatgatacaaaatgatttcatcactgcttaaatcattttcttttaatttcataccatcgctggttccatagcacaaatcagaacctgtaatcacatgcaatggcagtgtcttttttaataaacctttctgcgttattctgatatctattgacatttctaacgacacctttcttatgttcaaaaagccgccgcagatttcacaaaatccacgacgactttttgattatcgttcttctcggaagtaagagttaccaaggctctccggcggctgatattctttcttctttctgaagcttgtgaaaatcagtacgacgatggttacaaggtatggcagcatcttgaatatctcctgcatggaacggccaagccccggtatatagaggtagaggatatacagggcaccaaagaggaaagatccccagatagcgttaataggcttccacaatgcaaagataacaagggcgatggccagccagcctctgtcaccgaaaccgttgttggtccatgtaccgcctgaatattccataacgaaatacaaaccgccaagaccactgatggcaccaccgataatagttgccagatatttataaagtgtgacattaataccggctgcatccgctgtggcagggctttcacctactgctcgaagattcagaccttttctcgacttatacataaaccatgaaacaaggattgccagtataataccgaaataagtcataaaaccataggaaaataaaacatcgccgataacagggatcttggataatcccggaattttggtacggtaggtaccgcctgtcacagcaacggaaatctgaccgacaccgcctgccagctgtgaaagagaaccaccgaaaaagttgccgaaaccaacaccgaatgttgtcaacgcaagacctgtaacattctgattagctctcaatgtaatggtcagaacactgtagattaatgcaccaaaaccggaagccaacaaggcacacagcatggaaataagcacacccacaatgccgcttggattctctgctccgctttcatagataaaagcacccatcaacccggcaataccgcccatatacatcagtcccggaacacccagattcaggttgccggatttctctgtaataatctcgcctgttgcgccaaagagcataccgatgccttgagcaatggctttttgaataaaaacaatcaatgcactcatatcatcggcctcccttacttatgtgcttttgtaaatgcaattctgtagcggataaagaattcgctgcccagaataaagaataaaatgatacctgtaataacatcagatgcattctcattcagattgaactgtgacgcaatctgaatagcaccttttcccatgaaaacaaggaagaaggatacaagaatcattacgaatgcattaaatttggataaccatgcaacgataatagctgtaaagccacgaccgccggcagttgatgtagaaattgtatggctggcaccgctgaccagaaggaatccggcaataccgcatataccgcctgaaatacccattgtacggataatggtgcgctttacattgatgcgggcatagcgggccgtatcctggctttcaccgacaacagcaacttcatagccctgcttgctgtatttcatatagatatacatgccaatggtaaatacaagaacaatcacgacattccaaccgtaagtcagtccgcccagttccggcagccatccggcgcgggtcgctgaattgataataccgaccgtattggaacctgccggattttcccagtaaacaatacagaatgtaacaatctgcatagccacataattcagcatcaaggtaaacaatgtctcatttgtattgaaataagccttgaaaatcgccggaataacgccccagataacacctgctgccatgctggccacaaacatcaggatcatcagaaccggtgtcggcagtgaatcgccggcataaatcattaatgcagccgtagctgcaccgcccacaagaatctggccttctgcaccgatattccagaatttcatcttaaaagccggtgtcaggccgatagcgatcaacagaagaaccattgtatctctgatcgtcacccatgctcttcggctggtaccgacagcacctgaaaaaatacctttgtacacttcaacaggattcatctttgtcaatccaaaaatcacgatcgcacagacaatcagtgaaagcagcactgcaatcagtctgatcagccatgctttccaccagacaatagaatccctggccgcaatatgcaatgaagaatctttaaacatggctctcctccttctgtcctttcgtcatcaataatccgatttcatcctttgtcgctgttctgccgtctacaatacctgttacacggccgccacacaatacaagaattctgtcagatatttcaagcaacacgtccaaatcttcaataacacagataaccgcaacacctttcttcttctgctcgttcatcagattataaatctgataagaagaattgatatccaggcctcgcacaggataagccacaagaagaatatccggatgcatggcaatttcacggcccacaagtaccttctggacattaccgccagacaatcgtccaacaggggttgaaactcccggtgtcacaatgctaagcttgtcaatcaggcgttcagccagctctctcggtttctttctgtccgcaaatatacctttgccctctctgtagctgcgaagcatcatattgtccgtcatatccatggaagcaaccagtcccatacccagtctgtcctccgggacaaaggaaatatgcgcaatatgtatactttctttggaaatttgttccggagatttgcctgaaataacaacttcctttccatgctcgttcacacagctgatagtgccttctgcaatcgggcaaagatttgtaatagcctccagcagttccttctgtccgctgcctgcaattccggccacaccaagaatttcgccgccaaaggcagtaaagctgacatcatccagtgacttcaccccttcattatccagacaggtaagaccggatacttttaggatttcccttggattctccggttccgggcgatcaatattcagactgaccttttcgcccaccatcatctctgtcagcgaactttctgttgcatcacatgtattcaccgtaccgatatacttacctttacgcaaaacagaaactctgtctgaaagtgccagtacttcgtgcaatttatgtgtaatgataataatagaacgaccatccgctctcatgtttctgagtaccgcaaataacttctctgtctcctgcggtgtcagaacggctgttggttcatccaaaatcagaatgtccgaaccacgataaagcatcttcacgatttcaacagtctgcttctctgatacggacatctcgtaaatcttcttccggcaatccaattcaaatccatacttatcaaccagcgcctgaatgtccttgataacctcatccatgttcaacgtcatcttgcccggcaatccaagaatgatattctctgctgctgtcagcacttcgattaacttaaaatgctgatggatcattccgattcccagatcaaaagcatctttcggagaagaaatcatgacttctttgccgtttacaaatatctgtccttcatccgggaaataaatgcccgacagcatattcatcaatgtggtcttaccgcttccgttttcacccagaagcgacagaatctctccttttcttacggtcagattaacactgtcattggcaataactttttcaccaaaacgttttgtaatattttttaattcaatggcatttactgcttccaccatcaagcctccttcaacataccaaaatgaggctgtcgtgcgacagccccacttcagatatcatacgattactgtgttactgctgtaatgccatcgatgatgaaatcgaaagctggtgcagaagctttttcagattcatggaaataaccatcgctgatgtattcgctgtcagcatctgtcagttccttgccatttacagtgaatgtagaggtatcaaatatatgaaggctgccatcaatgatcgcatcttcaacttctttaaccttttcagctgtaccttctgcaacgaccttgtcattgaggtctgtcagtttgtctgcgccttcagcaaaacccttgcaccagtctgtatcaatagctgtaccgtcgatgacgcattttgttgcatattcataataaggttcccagttaatggaagcacttgtcagagctgcatcaggagctgtcggaatcatagagatattgtagcctacacaaggaacacctgctgcctgacaagctgtaggcgcacctgttgtatctgcatgctggctgatcaggacacatttgtctgcgatcagagattcagcacattctttctcaaggtcaaaacttgcccagctgtttgtgtacttcacttccattgtagcggatggacactgacttcttacaccaaggaagaaggatgtgaaaccgctgataacttctgcatatggataagcacctacataaccaaccttagctgtatcttctgtaatcttgccatctgcgatcatctcattcagtttcataccggctacgacacctgatacataacgggattcatagatagatgtaaagtagttgtgcatattggcaagtccactgccggctgcctgataccctgttgcatgacagaactgtacatccggaaattcagctgcggcctgaaggatataagattcatgaccaaagctgttggcaaaaacgatattgcatccctggtctgcaaggtctacggctgcatcataacatgtctcatcttcaggaatgttccatttgatgatgatctgatcatcagaaagtccaagtgcttcctgcataccctttgcaccggcataatgagcggctgtataaccctcattctcatcaccgataaaaataaaaccaactttcaaatccttaacatctacaccttcgccaaccttctctgctgtctcacctgtagattctgctgctgttgactcagcggctgttgactcagcggctgtctcactgtcacctgatgcaggtgcctgtgtttcctttgttcctgaattaccgcaagctgcaagagaagcagccattactacggtcaatacaagtgccaaaatctttttcatagtaactacctccttattacgtgtgcttaaaaacaaaaagaggcatgaactcctcactattcatgcctctttgcatgacaaaataccatctctttctgtcattgttttcaaactatctgctaattttagtataacactgattttcggtgtgtcaacaatttctgtctttcgtttttctaatttcatttataagaatgactatattttccagatttgtgttattttgtctataactatatctatttttataaaatattctgactattctccgtatccttcaggacccttgctgagtttctgcatcatcatctcaattcgctgccattcggcctccgtctcaatggcatggatcagaatctgttcatcctcctgctccggatcgtaagacgctgcataaatattataattacccgtctcattgatggaattgtctgtataaatcacataattcttccctgaaagatcgtcctcaaaagcccccatcacagaacctctgataatctgaccggtttccgttacaaatgttattaaatctgccataaaaccgtcctattccaagccgagactcttcttggtaaaattccaggaatctttgcacatgcgttcaagatcatactttgcttcccatccaagttctcgctttgcctttccagggttcgcataacagatggcaatatcgcctgcacgacgcggtttgatcacataaggaatcttgataccattagcagcttcaaaagccttaacaatatccagtacactgtaaccgatacctgtacccagattgtaaatattcacgcctgtagaagaagttaccttctcaacagcattcacatgaccctttgccaggtcaaccacatggatgtaatccctgacacctgtaccatccggtgtatcataatcattgccgaatacccccagacactccagcttgccggctgctacctgtgcaatataaggcatcaggttgttcggaataccgttcgggctctcaccaaggagaccgctctcatgggcaccgattggattaaagtaacgaagcagtacaacactccattccggatccggtacacagaaatctgagaagattctttcaagcatcagcttggttgaaccatatggattcgttgtagataatgggaaatcttctgtgatcggtactgtcttcggggcaccgtaaacagttgctgaagaactgaagataatgcgcttacagccatattcattcatcagttcgcataaattcaatgaaccggaaatattattcttgtaataagccagcggcttctgaacggattcgccaacggctttgagtgcagcaaagtgaatcaccgcatcaaacttatgctcttcaaatataggacgcatagactctttgtccagcatatccgctttgtagaaaatcagcttcttgcctgtaatcttctccactctgtcaacaacatctatcttggaattgtaaagattatcaaatgctacaacatcgtaacctttattcagaagttccacacatgtgtgtgaaccaatatagcctgtaccacctgatactaaaattttcataataaaatcctttctgttataactttctagggccgccgccgatttggcaaatatagaagtcggccggatagccgatctgctgtctgtaaattctaccaacgttttttataaaattgtcgacatcttctgtgcggacgaggctgatggtgcatccaccgaaacctgcgcctgtcatacgggagcctaaaacaccttctgtatcccatgctgcttcaactaaagcatccagttcatctcctgtgacttcatagtcatccctcagggactgatgggatgcgttcataagccgaccaaatcggttcagatcattgttctccagagcctgcacagcctgaatggtccgcgcattctctgaaacagcatgccttgcacgccttctgcagacatcgtcagtaatcgctgcctgatatttttcaaaatcatccatggataactcaccaagctgtctgatcgatacaactttctgtaaatcagccagtgcccgctcacactccatgcgtctgaggttatacttggaatcagccagaccgcgttccttattcgtacacgaaatgatcagctgcatattctgaagctgtaccggtacataacgataggacaaattctctgtattcagataaatcgcctgatgcgctctgcccatggccacagcaaactgatccatcacaccgcagcggacaccattaaatgtattctccgcatgctgactgatcagtgctatctcctgatcggatacttcaaattcaaatatatctctaagtgcccatcctgtcaagacctcaagggaagcagaagatgacagccctgctccgctgggcaggttaccgtaaaccatcatttcaaaaccacaggccggctgcatacctttttcttcaaaggcccatatcacacccttcggataattggcccatccatcctcatcatcatgttccagctgaccggtcagtgaactgttgataatgcccgcttcaggataattcattgaataaaaaaacaaacgcttatcctgacgttttctaaccaccgcatacgtgccaatatccagtgcacatggaaatacatggccgccattgtaatctgtatgttcaccgatcaaattcacacgtccgggtgcaaagtaaacctgtgcaccttccgcatttccaaaccgttctgcaaattcacgcagtaatcgttctttcatcaatcatcaaccgcctttccggcaactatctgccattgtcacacagttatattttaattctcaagagatttttttcttttcagacgtcttcttcgtttgccgccttcccatgtttccttccataatacaggatggaataaaacgagcattgggaacagttccagacgtcccgccagcatatcaaacatcaggacatatttcgacaatattgaaagtccgccaaagttcttggacgggccaacatctgccatccccggtcccatattgttcatcgttgtcaaaacggctgtaaaattcgtggtcagatctcttccttccaaggccacaagaaggaaagataccgcaaatatcagggtaaatgtaataaagtaaacagctacggaactgatggctccctgatccagtgccttgccctccatcttaatcgtacggacgctcttcggatggaggtaagcatttaattcacgtttcacgctcttcagcatcataataacacgcgaaaccttaataccgcctccggtacttcccgcacaggcaccaataaacatgatgatgatcaataccaccttcgacgcacttggccacagatcaaaatccaccgtagaataaccggtagatgtcatcatggatccaacctggaaaaccacatggcggatcgtatcggcagctgtcattgtcttgtcatagatattgataaagatcaatgcactggctgctgcaatgatcaggaaataacctttgacctcttccatgtcaaaggcatgcttaaagcgcttcatcaataaaaagtaataggcattaaagttgacaccgaataaaatcataaaaatggcaacaacccactgaatataagctgaataaccgccaatgcttgtatttcgcacaccaaatccaccggtgcctgctgtaccaaaagtgatcatcatggcttcaagaaacggcattttgccaataagcaggaaaatcagctcgacaatggtcatgccgaaataaattaaatagagaatacgcgctgtcgcacgtacctttggcaccagcttgcccacagatggccccgggctctccgctcgcatcaggttcatatgtgaaccaccgctcagcgggataatcgccaaaaggaaaacaagcacgcccataccgccaatccagtgactgaaactccgccagaaaagaatgctctgtgacagacattcgacatccgacaaaatgctggcgcctgttgttgtaaaacctgatatcgtttcaaataacgcgtctgtaaatgcaggaatctctcctgacaaataaaatggcagacagcctaccagactgatcataatccatgacaacgcagtcgtcacgcagccttccttcagatagaataccgtattggctggtttctttcttaccatcagatagccgatcacaaaactcagcactgctgtaagcaaaaaccagtaacctgcggattctctataaaaaactgcgacaatgcaaggaaataaaagaagtaccgattccactttcaatacactgcccagaataaatctgatcattcctccgttcatctggcacctccactaccgcaaaatatcttcaatattctggaaaccggtatgtgttgttacgatgacaactgtatccccggcctgaatacaatccataccacccggaataatgattttgccgtatcgattaatacaggcaatcagcagattatcttttgtgttcaggtctttcaatggcacatccgtcactcttgaactggcactgacattaaattcgatggcttctgcccttgaatcaaacatatggtaaatcgtttccacattgctgctgtccatggatgcctgttttgcacgaacataggcaacaatcgcctccgccgtaatatacttcggataaataacactgccaagatccagtttgtcgataagattatggaaagcatttctgttcaccttggtaatgaccttggcatcagaaacttcccttgcatggagcgccagcagcacattctcctcatcaatacctgtcagtggaacaagtgaatccacataagcaatttcttcttccttcagcagctcttcatctgtaccatcgccattgataatcgttgcctgaggcagcaaaacactcaactccctgcaacgctttctgtccatctctatgatcttgacttcaattcccatgtccagcagcatcttgccgagataataagctgccttaccgcctccgatgatcatcgtattatgcaccggtttgttcggcattccgatacgctcaaaaaactcctttgccgctttggatgcagcgataaaagagacaacatctccctgatgcagctcaaaattaccatccggaataaatacctgtttctctcgctctacagcacatacaagcacatcacccgaaatatttctggccatggccataaccttctggccatccagtctgttattcaccggaatcttaaaacggatcatctgtgcctgtccatgggcaaatgagttgacacctaatgctgccggcaagctgagtacatgcgtaatctcattggctgcttccatctccggattgatgatcattgccagccccagcttctccttcaaataagaagcctcatcgctgtaatccggtgtacggacacgggcaatggctgcacaatcacccacacgctttgctaccgtgcagcaaagcagattcagctcatcagaatccgtgacagcgatcatcaaatctgcattgtcaatacctgcttctctctgaatcttataactggcaccatttcctacaattcccataacatcatacatatctgtcaatgcctgaagacgatctgaacttctgtccaccagggtaatatcatgtccttccttatataactgttccgtcagggaggcaccaactttgccacagcccacgataataatattcaggcctctctttccctgcttatggtctttcgccatttcttcatttcctccattatgataatgacagcattttactgctcagaattcgttccttctataaaaatgtaacacctaacaaactgaaacatttacaatgctatatcattcagactccatatagtataacatactcaaaaaaaggatggaatagataaatgtatctattccatccctgactaaaatcatcattctttatatataattaccaattaactgcaatatccagctgtgtggaattgccggatgcaaagccacctgtatcacagacaataccaagtccaagactcgtctctacaattgagcctctcggatggacattcagattggcagcaaccattacataattgccaagcatcttggcaccgtcgtctctgacccagtactcatctgtattgccaagacttctcataatgctgacaaccccagacatattcaaattataatatgtttccttaccgcttggtccggtaatcgtacctgccgaagcagtcagaacaggcccatcccagctgctggcggtataacctttcacctcgtcctgatctgttgtaatataatcaccgtgaacatatcggatgtgaccttcaaaatcaattgcataccagccattctcctcatctctcagaatcttgacttcttcacccctcttcagtgttccgactttatctgatttctcagagctggctctgcgcacattgagaacagaacatgttacatagcctgtattctcttctgtcttctcttcctgtacgctctgtatattctgtgcgttctgtgcagtgtctgtatctttggtatctgctgcaaatgccggtactgtcatcagtaaagatactgcaacagcagtgccaagtaatgcaagttttcttttaatcattgatataaacctcctgtaaaaacgtcgtcttacattctcatattgacttgtagtgggatctgttttttactaaaatatttcatttgttacaaaaacattacggataatatatcatattattactcttttgtcaaatttatgtttcctgcaacattttccaatcatcgacaatcatcgacacaacacccaatccacaagtcgaaataccttttctgcatacaaaaagtcccgaaacattgtcgttccggggctgataatcatttatgctgttttacatttatgctgttatatatattacacaattaatccgtctcaatctgctcgccttcattggcgtcttccatggtcacgtcaatttttgccttatgcgttccctttccgattgcaccattcgctgcttctgcattctcatcgcctgcctccgcactctccacataatgcagccgcagcactgcctgggcccagttcaaaccaaccacagctgttttattctttactgcaccggcctgttgcatcaaatctaacaattcctccagtacttcccgggtcagataaccgcccctccagtgaaaggtcaatgtttttccctttttggccgcctgaagaaaacgcttatatacctcctctgtctttgtaaaagacagcttcttctctttgtaataaaaacggctgttgtcagtacatgcaggtgccggcgcaatcaacggctcatgatccctgaatacagctttatcgtccaaattgaaataatcataacgaatctccggtgcaccgcttccactgcgcccgagactgttgtcaaatgtggcatccagatgataatactttccatccagccggataatattccaggtatgtctgtacttaatacctttttcaggattatttccgcaaatggctataatgcaccagagattcagtgcatcacacagaattttcactgacttggcaataccttcacagacaccgaccccctgtccaagaggcccgattatctcatgggaataggcctttttcagcttatcataacgtacattctcacaaacaaaatcatggatatatttttccttctctatgtccgacaaatgcttcgccggacgtatcaacttgtccactctggcctttaaagctctttgatgttcacggattttgttcttctcaaaaatatactccggtataaaaatataattcggtgaatctttgaaatatttgtacttgaatcctgtagcccaaaaaatctccggatgatccagccgcagctgaaaaaatacatcatagagttccggcccctctattgcaggaatctgaaactcatccgctagagctgtaattccctgcaaaatagcatgatacacagactgcttctgcttgttcatctgctgatagtaatacggttccatcttgtcctacttccagcctttccaaacatccggctgatagcccactgtctcctgcgcaccgtttcggacaataggtgtctttaatacctgctgattctccagcaccttttcatccttgtcttcatctgcaatatacttgatcagcgccagtgtgtcctggtccttgcacttttgattcagcatagcatccagaccgcctacagcctgtttcacctttgtatactcccctttgctgagccccttttccttcatatcaatccactgatacttaatgccgcgctccttgaaataacgcatggccttctttgaatcaaagcactttgatgtgccgaaaatctgtatgttcataaaagtcctttcgtctatactatcttttatactataaatgttcagtcttcctcttcaaaaacatccatatcgattcgtttgatccgataggtatactctgtgctgacaccaaaatcatgttcaatcattagctctgccagatgctgtccgtcaataagaataatatgccggtcattggcatacttctgtgcatccggagaaaatctgccggttgtcacaaataaacccttagcattcttctccggtatggcgcctccaaacttctgaagttccggacgtccaaccgttttttccaaatcatatctctttgcctgaatatagatgacatcaaaacccaatttatcctgatacaccatgccatctattccctcatctctgcttttctgggtaatctgaccacggccgtatcccatcttttccatcagctcaaccaccattttttcaaagaaatccggcgatttttcgtgaatccgagttaaaagttcatcttttaagacattatttaattctccatacacccgctccaaagtctcctgcggtgtctcatcattgtttaaagaatccttttcttctgcagtatctttaactttcttggtatcaccgtcaataaactttacaaaagaaggaaattctctaagaacctcattggtaatttttttccctgatttcaatacttctcttcctgattttgtaatcataaaatgcgcttttgtcggactttctatcaaccccgcctttttcagatacgttctgcaccatccaatgcgattgctgaacacaggctgttttccacttggcagcagctctgccagttctatatctgtcagcttaaaatcttctattactttctttttgacatctgaatacggatgctcttcgccatccgataaactctgaagaaaagaatgatacatttcataatactttggtactgccattctgcctcctagttattctctccttatatactaaaattccctatcacaaccgacagggaataacctgttttaataccattacatcattctcaaatcctcgcatgggaggatgaatcaaaaataaattacatactatatgtttttacatcattctcaaaccgaaacgccgcccttctcagatcaaagaaagcttgagtaccatacatttttacatcattctcaaactggtagatcttctcaacatacagtccttttgcttgagtaccatacatttttacatcattctcaaacggcgataaaatccagctttttgtgtgctgagcttgagtaccatacatttttacatcattctcaaacgttacataggcaaggcggacggcattctatgcttgagtaccatacatttttacatcattctcaaacggccgtattcatttatcgaatccagtaggtgcttgagtaccatacatttttacatcattctcaaacatgtacggataagccgtaaagccttctgtagcttgagtaccatacatttttacatcattctcaaacccctgccgttccagttcctcaaacagttctgcttgagtaccatacatttttacatcattctcaaacgaacacaagccgtaaaagagtaaggaggtagcttgagtaccatacatttttacatcattctcaaaccagaattgtataacaatgccgtcacagtcagcttgagtaccatacatttttacatcattctcaaacgagagtggtgcaatcatacgattcctgtttgcttgagtaccatacatttttacatcattctcaaacggagcagatgcacttgaggactaaatacaggcttgagtaccatacatttttacatcattctcaaactgcaattgtatacgaaacatattcttttgcgcttgagtaccatacatttttacatcattctcaaacattcgtataagcatctgttgaagtggttttgcttgagtaccatacatttttacatcattctcaaacttccttgtcatgtttcttcctcctttttctgcttgagtaccatacatttttacatcattctcaaacgatacatccatattggcattctgcgcttaagcttgagtaccatacatttttacatcattctcaaacatacgatcgtcatcgacgaagcgcatcattgcttgagtaccatacatttttacatcattctcaaacctcaaattcaaaaatgaaatgctatcacctgcataaaacaaggtacccaagctgtgtgattttaatagatttcacaaccatctctatctataatataccgcattcctccttccaggcaagctctttcttgactttccataaacagaattttcgcctcctgatatctaatttccttaatcaattcctgtatctgttcatctgtcaaatagctcctgatatttacgaaaacaaatacctttgttgataaaacttcaactgcaatttttacatatcgtattattctttcgaaaaaatcatcttccatttcctcatgcttaatccctaccgcttttaacaatgcaggaatttccaaattgtcatcaaatgataatatataatttgtttgttgttctaactgcattaaatattcatgaatataagccgtcaattccaacgtctcttcatacatttgttcttccttagaaaccttctccaattttatatatagtttatttaatatctttctactgttaatctccactgtaaatggattgacaataatttcaagatattttgacagctcaagaatcttatctccctgtgataaaacaaaccggccctcatctttttcatattgacagtacaattcatgtaaatattctgaaaaatattttggtgattcaatgatccattcagtaaacgcagctgactcagaaattatttcaccagaaagctcagaatgaaccattttcataaaatcaccaacctctcatcactatccaacacttcacttttcactgtacctataatcaaatccattttcgcatactgcttttccgtgactgctaataattggattagtccttcatccggcttattttttcgtacattttctacaattgctttaacagccgtctgatttaaagccaatttacaatacactgattcctgaagcataataaaaccactttttaaaaggaactttctaaattttgtgtaagctctgcgattttctcccgttattgtcggtaaatcaaaaaacaccaataccctcataaatctataactcaatcttataaaatcgaatcaacgcactatcatcttcgcttaatgcatcaaaaacgcttttgcaataaatcttaatggcattattaacatattgaaccttgccgtcaatccgtacttcatgattcagaacattgacaagctgcatcttttctgaatgttgaaacacttccaaggtcatcatcaaaacttcacggtctattaggattctaaatggttccatcaaatctgacgccagattaaactgattgaacatattatcatgaaaaattcctaattgcgtcaaataaccgctcgctacgatttctcttgcaaaggctgacatcaaaacagaatagccataatttaatgccgcattaatcaagctgtcttccgtccgtgtaaaatccaatccaaatagcgaattaaaataaaccttcgccgcatgcccctctcgatttgtcccgtcattccaggtaatttcctttaaatatgtatctaatagtgcagactctttcctcctcaataattccagcaaatccttttgttttcgtattttgtccgtaacaatttccgtccatatcgcttcttttgtttgttgtttccaggcaatttgcttacgaattttgttgctcgtatcatgactgccataataattcaccaactcacaagaaggatttcttttctcatcacagaaaataactttaatttttcgttttgccaattctgaaatcagactggcggtaatagataccgccgttgattcaatgataattgttgaaatctcacttaatacaatctttgttatctcatcactacgaacaaccatcttacccaattgtaaatccaacttcgcacgttttgagataactataattcgccagctcataatttcatcaagtcaatctctttttcataaatgcctgtcggagattgattaataacagaaatctgtttacatgcagttatattattattcatcacaagaattcctgcacttcctggccctccaattaattttaaattagcagaaccactctgacattggaacatatgtaatatttcattcaaaacaatgcattgatcttcattgcttagaccgataaatttagctctcttctccgtcaatgttttaatctgagcagataatcttattgaataaacagtatttgacaatttatctaagaaagtatcgtacaactgcagcaacttttcttcagtcataccatcgcgttctgaaagctttgcatccttattttcattctttcgattcacatatttaactactcccttaagaatcgcagcttcctgatgtgataatattaattgatttgcgcctttaaaaatcagctgattacctgtccttcctgacagccacatcttaaagccatccactttgaaaagggtatctatttttatcttactcaatagaatttctggtgaatttaatcccctttcttgagtcaaatactgaatcgccgattcatggtttatctcaatctgattctttaaataaagcggtacaaattctatcgttcttatctctttgccttttttatccagcgatttaaccaacataaaatacgttccggctgctttattgtaacctccatatttctctatattggcaagtctttcgtcattacccttaattggtacctgacctttccctttcttcataatctgctgatcaaataaaccgccttttacctcataagcctttctggtaacaagaatattattcttctgcataacctttttgactgtaacgatactccccttattaccggccttccacgctatttctccactacgctcaatatcaaattcaaacatgcgtttcaaattataagaccgacccggattatttctaataaaccaggctgcattctttgtgaatttaacaaaatacgcatttcccaccacaatattcaagtatgcatctttagcatgatgcaaatcattcatttcacgcactttcaataattcatacgtctgcctgaaattcgatacatttcctgcttttacatacacaatttctgtatcaggtaaagcttcttttaaaatggtcgcaaccgcctttgtactctgccgcgtttccacgatttgcctttcaataaatcccgctaattcatccgcgctcaattcatcacttctgacaagtcgtacatatttttccttcgtaataaatccctgttgcagcagcattttccagaacgacatcattttcttttgaatatctaatgacaaaggatatgtatctgacttaatagcgttataatttttcttaaccaaaacacgattattcaggctatcgtccattgttttagattgaggataaatgtgatcaatgtcatattttgtgttatcccataattcatccaactgtattgtttctccagaatacatgcatctgcctttttgtatataatacagaaataatttatcccttcgcaattgctgatctgactgcgcatttaattctgtaatccaatccctctcctcatctttgcatgcgcgatacagttcaactaactgtttctttcgggaatctgaacgcttgccctcctgtttctctctggccatttcaacaaaaacacgttttggcgcatttcccatcaccttctgaatttctttaaccactttcagcgtctgccaaatttgtcgttttactgcaggtgatacatataattcatctaccgttttataggacagatccgtttcctttttcagtgtattaaattcttctacctcatttgtaaacccataatttcggcttagaagctgcatcaaattatcatttgtctgccataaagctgtcattatattccaaacttctccagttccaggcgcaggcactgttatctcttccaagaacgttttggataatcttccccatccctgataggatagagaacaaattccttttaactggcctgttgtcagattcggatacattttactcaatctctgcttcagcaatttcttatcatcaccaaataatactatattcaatacaattgcttcttttgccttttgactcaactgtacgtctgttaatctttctttaaaatcatgataagccgttaatgacgctttgaaatctccgtcaatccccgtaatttccacacctttttttgctattccctcaataacgagatagcgctccagtttttttctcgtcacctttctatatttacagaataactcttcataaattctttgttttaattctactgaaatcttctcaccatttaagcgtaagttatttaattcattcaaaaccataaacttactgtatactaaagaatctttcggcagaacatcttcgcccaccaaataagtacatttattggtcatccgacgaataaacttttctgcactggcttctacatcaataacatctgtgaaattccatgggtaaatttttgcatcagattttcttactgaccatgtaaatttcccctctttcccatcatccactctgttaagaggcccaacataataaggaattctaaattcaaatagctgttggatcttttcagcattttctttaatgaaaggcatcctcgttccaagattatcaagaattttctttaattcataatcgtgtacctgatacggaataacaccattatctttagttacctgtttaggcaaaaagttttccttctcaatttcagactctatttcctgtgtgatttctttatggtcaataacttttatcacattctttttcagaaaatcataaaaatccgcctgtgtacactgcttacttttcagatcaactttctttccattcttttttgtcatcccaatatatgcactataattatttagcttttcttccgtatccacaaatacacgcttataatcctcttttgtcatatattgacgaacaatcttcttaagtgtcttcaaatccgcttgatgcttctgataaactttaattttcgcttccgaaatagaaacactatttcccagaatttcgactaacaccgaccagtcatataccgcctttgccgacgcaataatatagtattgctccgccagctcagcctcaacgattccaatataatcatcatatccactatccgcaaaagagactttcggtcgctcagactcgtctaattctttattattaaagatatcacttaattttaccgtaccaccggacaataaatttaaaatagccttttcacaagcactttttgcatttaattgtttaatcaatctggattttttagtagaacgggtcaaattgcggtctttcagtatatactcaacaaattgaatcgcagcatcatccaggcttatatgccattccaactcttcatcctgaatattttgaatcaactgctcaaatgtactcttaaattctttaatctgactgatatcccctgaaagcaaaaaatgtcctctatgtttcatcatatgatgcagaacaagataaacaagccggatatctggtatttctgttgtttccatcaacatttttcttaaatgataaatagttggataatctttgtgataatccttgtctgtataattatcatctacaaataaagcatatggtaattcgggacaatttccctccgcatcccttttgtcctcaggataatatttgctttctttcattcgtaagaaaaatcccggatcaacttttgatatttcttctgaaaaaatctcctgcagcacctgaattcgccaatttcgtctgtccaaccttctccttgctgtcctaaacatccgtctctcttcagctgttgaagcactttcaaataaacgcgttccccataatgctttaccatgctttctcattacctgatatgtactgtctgtcacagcccatcctaatgagcctgttcccatgtccagtcccagaaaataatcctgtttcataacattttcctctttcttttatattgacttttttatgctgcaatactatacttaagataagtttagtgccatactaaattttacatcataagttcaaataagaatttattcaaatcgtcactttaagtgacccacattgtgtggttaaagcctgtttataacaggctttattttttattcacaatcaatagtttttcagatattttttattttaattatacagtactactagtatattcgtcaaacaatgtctcttgctcccactactcaaatcatatataatattattaatacatcaccatatcttttaaaagaaggtcactgtcatgccactggcaaagggaaatacctatacaacaaaagatatctacgaacttcctgacgggaaacaacaaggtttcctgtgaggtttatcccgcaccttttgctgtttttttgaacaggaatgaccacaattaccttgaacccgatatttctgttatttgtgatgcggataaacttactgaatatggctgcaatggagctcccgactggatcatcgaaattgtatccccatccagtcagcgcatggattatcagattaaactttctgattttctttcttaaataaaaaacacagcatttaagtcgatatctccttaccactcaacttaaaatgctgtgtttttccatgtttttttacctatttggttttaattagttttcaaaatgaatctctttcccgtctataaatcttgctctgatgttccggtcatctcctatataacagaatcgctccagacgctcttctgccgtaagcggtacccatgaatcttccatagtatcaataaccagagcattaaactgatatcccttttcaaaggatccgacttttccaaagacgcttcctgcttcttttgttgcatgataaaaagcctgcgtaagcgtaattgtctgactctgatccggctcataaaattcctttaattttgagagctgaacggcacgcgcaatctgcttgtatatggcaatgctgtgtcctccggccacatctgaaccaatagcaatcttcagttcttcatcatgcatagccgccagcggcataatgcccgcaataatattggtcgttgcatccgggcagtgaaccgaaaaactgccgtgctctttcatgatgcgcttgtcttcttctgtcgggaaaataacgtgtgcaaaaattgaagggccatggtccatcagaccggcacgctcataaatctctgcatctgaatgatatccagggaaacatcttaatgcttcctctgcttcccagatcgattccaccagatgtgtatgcacaccgcaatggtacttcgctgcaagcatgccgagacctgtcatcagtttttcactgcatgtcggtgcaaaacgcggtgcaaggatcggtttgactttcccactgcctgtatgactgtccagatagatttctgtttctctcagtgaatcttctgttgtctcaatgagaaactccggagaattacaatccatattgacttttcctacaaaaccatacatgcccttttcttccattttcctgaacaaatagtctgttgcctcacgatggatggttccaaaaacattggcatgaaatgttccatgacaaatcatatcatccacaaaagcatcataacacttctttgcataagacagatctttaaatccggcttcctgcggaaatgtgtaatgattcagccaattggaaagaagacaatccatgcctattccacgctgcacatactgtgaaccatgcacatgcagatccgaaaaggccggaatgatcatctgacgtccataatctatacattctgcatgcttatatttctccggaattaccggataaaccccctcgacttttccactatccactgcaatatagctgttttcataaactgccaacgcatctgcagatggcgtatacacaatatctccatggtataattttactgccatatctatttactccactcagtttttcgactccaaattctatacaaaatctgatgacagtgcctgcctgctattttgctttcatctttttgatgacttcattggccctgtctatgaatctgttatatgcctcaaagctgatcaaaccattactattcatatccagataagatctgactgcccagaaactccaaataatacctttttcaagattatcattcacctgatctgcggtcacaagcccctgctctacgaggaattcatagaacattttcttcacttcaggatactggaacatttcataaaaaccacagtcatagcccaatggtacaagatatttttcaccggattttgtaatttctgcagacactgccacattcatgctgtcatgacagatttcaatcgcataggcgccattctcaatcacccagtctttcacctttggatcataatatgcaaaatctctgcgctccaacgaaaaacatacttgctttttctcacccggctgtaaaaatatcttcttgaatgcttttaattctctcaccggtcttggcagtcttgtcttcatctttggttcaataaaaagttctacaacatgttttgccgctacagcacctgtattggtcacatcaactgtcacgattgtatggtcattctcttcgctgaccgccagatgttcatattcaaatgatgtatatgacaaaccatatccgaaaggataggctggctgaatacccttcttttcataatagcgatatccgacatagatatcttccgcatatggaatttcatatacattaccatcaaatgaaaggtaggccggtgtatcctgcagacgctccggaactgtgttagccagacgaccggatggtgatacttttccaaacagaatatctgcaatggcactacccataccttcacctgaaaaccatgtcaaaagtacggctgaaacctgatgacgccatggcatttcacaaacttctccgctggataagataacaatacaatttttattcactgcagaaacagcatcaattaatcgcgtcattccttccgacaatttgatatctttacgattataatcatcatcctcaccaggaagaaaacttcccacaaacagaagaacctgattcgcttcctttgctgtttgaacggcttctctaatcaattcatctgttgtcgttccatcggcctgatatccctctgcaaatttaacttcacactctgttaaatacggaatcatctgttcatatggtatatcaacctttctggcatgaactgctgcgcatccagttccctgatatttcggttcttttgccatatgtcccagtacagcaattttctcacctttttgtggttttaacggcaaaatctgattttcattctttacaagaaccatagactctgcagcagcttcaactgccaaccaatgactgtcttcatgcttcactgtatcccatcctgcttcccactcttttaattggaaaacaagtttcaaaattcgcgctactctttcattaaccaacttttcatccagctgtccagtctctacagcttgttcaagataagcagcagaactcttgcttaaaggcatctgaagatcgattcgtcctttacttgcttcaaccggatctttaacggctccccagtcgcaaacgacagtaccgtcaaatccccattcgtccttcagaatatctcttgttattctgttatcaccgctgacttcttctccattaatcttattataagcggtcatcagactcaccggatgtgcttttctcacaacccgctcgtaacctgcaagataaatctcccgtagtgctctttcactaacatgtacattcacacgcgtacgcctggaatccgaattatgacatgcaaaatgtttcatacatgtgccgacaccttcatgctgtacactgctcacaatcgctgctgccatctcacctgttataaccggatcttctgaataatattcaaaatttcttgccgtcaatggatgtctgtgaatattcattcccggtcccaaaagcatattaattccaagttccttgcactcacctgcaagttttttaccgatttctccgatcaactctgtatcccatgaagaggcaatagcagagccacttggaaaacaagtggctctgtatgtacgtgacatggcttcctcattgtcaaaactgccaccaaggctgtcataaaaagacatctcctctggctgatcagaaccaatctgaaatcttacaccgcttgttccatcgcttaccagaattgatggaatgccaagtttttcataatctcttgttctccatgaattctttcctgtacacaagagaactttttcatgcagtgtcattttgctgatgatttcttcaatttgttcttttttcattgattaacctgccaattctgtaaatttaatttttgagctattatttagaaaggttatcccaggcatcctgaagctcctgaaggaattcctcgtttgtggatttgcctgcaccaagtttctgtacagcttcacctgctgcctgcgcaaaaccatccggatagaatgtatagtagatgttgtctactttgcctgctgccatgtaatcagaaacagctttgccaagagtaccaatactgtccgcatctgcttccatattgttgtatgcaggaatcagctgtaatgtctttgtcatgcattctttaccttcatcagatgtaacaagccagttgataaagtctttaactgtatcaagattctcggaatccttgttgacaccccagtatgtacctaccaaatataactgatcattttctttttcatcactagaataaggaatacccatcagacttacaggcagatccgggttgattgcatcatacgttggctgtgaccagttaccgccgattgtaatagccatatcaccggaaccaactaaagatgtctgtgtattaaagtctgttgttgaaggatttgtatctaaagcatattcaaatgtaatgaaatctgccagttcttcaaatactttatttcccacaaatgatgcagaaccatccgacaaaccatcaatgaatgccttaggatcttcctggccagcaaaaccaaggttgatcataaagttgcctaactgataccagtccatataagtttctgaaataggtgcggatacaccggcatctgccagtttctgtacatcttctgctaattcttcttttgttgtcggtacttttgtaatacctgcctgttcaaaaagtgctgtattataaacataacctgctgcctctacagacaaaggaaatgcaaccactttaccgtcaagcgtaacattttctgctgaagtatctatcatttcagatgtaaaaggttcacctgtcagatctgctaactgtgactgccacacaagtgcatctgaatacccctgaatactgaaaatgtccggtgcatcaccgcctgaaaactttgtcttcaaactcgttgcataattatcagatgcagactcgcagacgaatttaacccctggatgagattcagagtaaacttcacacaccttctcaagggcatcctgaatttctgttttcatctgataaatataaattgtcttctcctcaccatctgctgcctgagatgccacctgtgtatcagatccttctgctgcacctgttgtttcctttgcaccactgttgccgcatgcagccatgctgagcatcattgcaactgtcatcattaaagctgctgcttttttcatcttcttcatcgtcttcctccttaatcctttagttaagtttcctctattatttaaccttttacagccccggcaataacaccgtccatgatctttttctgtaaaagaataaatacaataacaatcggcagaatcgtcattaccaatgccggcaatgcaatatcccatttactggcgtactgtccgaataatctgctgattgacaactgaatcgtcatcaatcgttcattattcatcataattaacggaaccataaaatcattccatatccagaacatatccatcaacaccacgctgacgattgttggcttcaaaagcggaatgatgattgaaaagaaaattcttgttcttgaacagccatcaattcgagctgactcttccagttccaccggaagccctttgaccgcactctgcatcataaaaaacgcaaaagcaagaccgattccccaataagtcagaattgttccaaacatagaattattaagtcccagtactttcattacctgtacaaggggcagcatcaatgatgcaaagggaatcaacatcgataatataacaaaggtctcaaagacttttgaatatttcgtctgatatctgaatgtccaatatgcagtcatcgccgcaagtaaagtaatacctgcaacagaacctatcgtcaaaacggctgtattcttcatgacatgcagtacattcacttctttgaatgcctttacataattttctgtctgaaaaacatccggccagctcaaaggctttgtcaaaatctgagctaacggcttaactgagttcatcacaattaaaaaaagcggatatacgaagattaatgccagaatcaatacgatcacaaatataatggctttttgctttttcgctcttttgttcattacatcaattcctcctctttctttctggagaaatacatctgaacagatgtaataaccaggataatcacaaaaaatacaaaggattctgctgttgcaagaccatatttattattcgcaaaggcatcattataaatattcaatgcaagagatactgtggagccatacggccctccctttgtcaaagaataattcagatcaaacatcttgaatgcctgagaaatcgtccagaacaggcataatgtaatatatggcatacataaaggcagcttgatcttaaagaaaatctgaaatgcgttggcaccatcaatcttggctgcttcaacaagttctgaagaaatgccggttaacgcagcaatcatgataaccatcacataccccatcccctgccatacggatacaatcacaatggctgcataggccgtcatttctgttccaagccacgaagtcatcaacggcccgaaatgcaataatttgccgattgcaggtacaccattgataaaaataaactgccatacaaaaccaaggatcaatcctccgatgatattcggaagataaaatacaactcgaaatgcactctgcaacggaatttttgtcgttaacagtgctgctatcgcaatacctgcgatgttcatgcaaacaacattacatattgcaataatgaatgtaaacttgaatgcgccgagaaaattactctttccagtaaaaatatctatgaaattcttgatacctataaatgaaatatttgaagatacaccgttccagtctgtaaacgaatagccaacactgatgataaacggtataataatgacaatgagaaacacaattgatgccggacccaaaaataaaagatgttcccacaaagccggactattaaaagacttcttcctgttcataaaacgctattcctccctcacccttaccggcagataccgattactaatagcacctgatatttttattcgttgaattgatatctctattataatcaatccctgtgaataatcatctcattttttaacaagtaaaatgcatttttttgatgttttatttttaactcatcatcatttttttgatgttttatctgtttttattcttttaattgacattatttgacttataaattatactaatattacatttatttatcatttttttgatatttttatgctatgaattttcaaaagggaggcaattatggattattttcatgaaacgatcaaagttcctgaacaatttctcgcatgggtctatcttcaatcagaaaattgtattaccgatgtcaagaagcactggcatcgaagtctggaaatttcatatatcatcaaaggttcctgcttatttgaaattaacggacatgaactcgaagcacatcctcatgacatcctgttaatcaacagctgcgacattcatggctgtcatacaaactatcattcagaaagcgaaatgctttcgattatctttccatatagttttctcatggctgtttttccgacttttaataattaccgctatatcgtagagccttcatctgatgcttataataaattggaatctgcttttgcggaaatttatccgattttccgcaatcgcagccagcttcctctttatcaactaaagctcaacagtttcttttatgaaattctttacattctgttttccgaatgtaaagccccaaaactcgttcctcattctatcaaatcacaaaagcatattgaacgctgcacagaaattatcgactatattgataaccattatatggaaccactttcattagaaatgctggccgatgttttttcactctcaaaggaacatctctcacgtacatttaaaacatacatggacaccactttcaagaaatatctgaccagcatccgtgttcatcatgcctatcaggatctgatggacacggatctgtctatactgcaaattgctctggacaacggtttttcggatgcacgggccttctccagtactttttacagctattatggcgaaacacctctcaaataccgaaaaaacagtaaagaatccgatatatcccatcaaaaaagagcctatttgagaactcatggttttctgtaaacaaaaaataaaaccgttccaaatcagtatcctttttcaaaaatactgttggagcggtttttttatctctatcggtttgcttaaatgtatattcatacccgcatccagacatttccgaatatcctcctgatatgaaaagcagggctttggccttgtaaaaagcggcgaagaggcccgtttcaagctttctgactatgagattaccggcaaaaagggtgctaaaatgcgtatgaatatcaatcatgccaccaaagccggtgtcaccgtccatgaatacaaagttcttgaaaaacgtgaccctgccatagacaaagaattcaaccgcattaccaatgaatggctggaagttaaaaaaagcggcatgttgcagtttaccatgggtaccgtcggattggaaaatccaatggacaaacgttatttctatgcactgaattcagatgggaaaatggttgctttcattgtctttgtaccatttcttggcaaaaacggttatatggcggatgttacaaggcatggcaaggatgctcccggcggtgtaatggaaacgattatttatcaggcattccaggtatttaaagaagaaggtattggatacggcagtctcggtgttgccccattagccggtttggatacagaaagcaaaaatccaatggaacgtctgcttcgatttatctatgatcatttgaacgattgttatggttaccgtgatctttatcaggcaaagaaaaaatacagtccgacagaacggccgacagaatgggtgccttcctattacgcttatcttccaaaatatccaacacctaacatgctctttgctgcagttgaaattcagaatccgcacggcatccgcggttatattatgatcattctgaaaggtgaactgaaacgtttaaagaaatagtgccaagcaccggatcatccgaaaattttaaacctttccaatatccaaatatttaaaaaagctgttgttttacaaatctcatctgtaaaacaacagcttttctatttttgtttatctatttattatctatttatggtcatcggggtgacaggattcgaacctgcgacctcttgatcccaaatcaagcgctctagccaagctgaagatacttggctcagtagagccattgagcaagaagcccccacttcaaaatctgtgatttaagtggtgggagcatgtcacatgaagtactgctgcgatactccggataaataaaaaataagagaaaccccgagtttttaacgagcctgatttcacataatgttctgaaaacgtttggcgatgagcctgtttgcagaacattatgtgaaatcaggtgactcaaaactcggggttttttcattttaattttggagaagcttcagcagttcctcttttgtcagctggctggcagtgacgccttcttctgacagtatctgatccgacagagcctttttgttttcctgcagttccagaatcttttcttcaatggtatgtcgggcaatcagcttgtagacagtgactgtatgtgtttgaccgatacggtgtgcccggtctgttgcctgattttgggcagctgcattccaccatgggtcatagtggatgacgatatctgctccggtaagattgagacctgttccaccggcttttagagaaatcaggaaaacaggaattttgttttcattaaaagcattgacaaggcgggtgcgctgctcactctttgtactgccgtccagtcgatagtagagaatgcgctctgatttcaggcggcgttcaatcacatccagcatagatgtgaactgtgaaaacagaagaattttgtggccgccagccatggcattttcaatgagctggatacaggtatccagtttcgctgagccgccatggtaattctgatagattaaggacgggtcgcagcaaagttggcgcagtttggttaattcagctaaaatttggattttacttgtcttaaacatactgtcgctctgctgttccagatctttctggagcttcagtgtattggcagtgtaaagcttgttctgttcatccgtcatctgggcataaaccgcatgctccagtttgtccggcagttcctttaagacatctgttttcagacggcgcatgataaatggacgaacaagctgctgaagtcttgtggcggcaatttgatctttattttctacaatcggctgttccaattctgaacggaaataagcataaggatatagaaatcccggcatcaaatattcaaaaatgctccacaattcactgaggcggttttctatcggggtaccggtcagtgcaaaacgtgtgacagagtggatgctgcagacagaacgtgctgcctgagtacgatggtttttgatatattgcgcttcatcgataatctgataatgaaaatgaagattgtcatagcttgcaatgtcacgtttcagcatgtcgtaggaagtgatgagtacatcataatccgcatagtgtgtcagtaattcctgccgttcctgggcagtaccggtgatgagcaaggttttcagattgggtgcgaaatgctcgatttcactgtcccagttgtaaacaagcgacgaagggcagacaatcagactgacaggaggcggacatgctgtatgggaagcagtatctgtcaaatcgacagttttggatatcgcttcaagtctggcatgttccaatagtgtgatgatctgcaaagtttttccaagtcccatatcgtcagcaaggataccgccaaatccaagctgtgcaatggtgcaaagccagcgatagccggttttctgatagtcacgcagaatgggtttcatggcatcaggaacttcataatcgctgtcagccacagatttcatatcacgaatcagtgatttgaaataacggtctctatgggactgtatatcactgttgtggctggtaagaacggcatcaatataggatgcgcgatataaaggcacagaaatcctgccaccacggatagcctgttcagagagccgaagcccgtcagccaattcagacaaaacgctcagagaattattctccaatttgagaaattctccggatttcaatttgtagtatttctgtcggcgtctgtaactgttcagaatgccggccagctcttcataaggaagactgtcagagtggatatctatttccagcagaccgttagagacggaaacaccgacagcggtccgcggcgctgacaggatgcgtatgcgtttcatattcgaagatatgaaaacttcagccagtttgtaaaaatgaggcagtccctgttccagaaagaggaaagcagcctgatcatcatgactgatgataaaatcagcatcagcaacaggggaatcttcattcccggatactgcggcaggctgaaaataagtctgaatagccgtcaggattctgttctccatagaggcatcacggaaaccatcttcacaggagataggcgtggcaagagaaaatgtttcttcgccataacgagcataagctgtacaactgatgatattttcagccggattgtcaaggtaaatactgaaatgcgcttcaggcggttcataatcggtcagatcaacaccttcagtgtgaaaatccgtatgggcttccagatgcttcagtacactgccgtaaaaaggtcgaagttgtttctcggaaagtgtgatttcacggatcttctggcgatttaactctgtcagatagggctgcatgtcctttttgaaggcttctgagcaacgatacaggattttatcttttagaatccagaatgtctgggcaccggagagtatcagacaatcttcgatggtcagatggtaggtgtcactatcttcggctttgagttcaagtgtaagttccgggtttccgtctgtaacataaatgggccggatatgatcatcgagatcaaactgaagcgtatgtccgatcatcatattcagaaacatgtcgacagcagttggagacagcggaaggtaacgcagtgctttcattgtctggaaacgataagtgctgtcctgaacacagtggaaatggtattcgtactcttcaatccgctgcataataaacgccagcatgctgcggctctcagtagtgaaagcctcaggttcatggaaaaatttcagattctttccatattgaaataattcaccttgacgaataaggcgggcaaactccagcaagtctttgatgacgtatttcttgccggtgccgatcttgaagtcgacggaaagtttatgatattgtttatgaagaattggctccaattcaatcagaactttggtttcggatgcttcagcaggatagtgggtgccggaagattgatgaatataagattcaatcaatgtctggccaatccgattttgtttttttgccggaaagcttatttgaatatgtcgtctggagatatatttcaaaaggatagcgacgcagtggcagcagagcccttctgattggtaaaaatcggagcaggaacataagctgccgacaatctggctctcatcttcatcgatggatacctgggtttcatgttcactgccgtctgcatcaaggacagtagcggtgatcataggggtacctgtcagtgtgttaatatccgtttcaaagtttttaatgcgcttatcgatcaaaaaaatatcctgaccttttcgataatctgcatcagaggaggctttgataacagtcattctggtaattgccatgaaaactcctttcagctgtgaatgtgtgttcgtgctgcacagcgtatagcaggccggaatagccgcaacctgctgtaatcgtaaacttcattatagcatatttgacaaattctgtccgcagtttgacacgaataagaaaaaaagaatgtgccaaagcacattctcgcgccgagcgcggtcgcttgcgacaatctacatctttgcgcgagtgcgcatcacaggcgcgttagtgcctttttatgtaatagggaattcctcggaatttccaattacataaaaaaatatgcagatatcatggagatatctgcatatagattgagtagtcattatgaatggatttcttcaggataaaacaatccccagtcgctgcggagttttgtcataatatccatgacatcagaagattcccggagtttcatgatcgccgtattgcctgtaagaatcgctgtttccatatcttcaagttcatattggagcgcattggaggtgcgaccggcctcaatgatggtctgctttccggtttcagcgtcaacaatgacagcatgatcggctctgggatattccataatttcgatatatgctttttcacagctgatcatcgcgcgttttggctgctttgagtgcatggaaagggcaactgtggccatctggccggaaggattcatcagcagaatggatgcctgttcatcacatcctgttggtgccggtttcatctggctgagaatctgatccggtgattcacacataaaacttcggacaatactcaatgcatacacaccgatatccagcatagcgccgccagccagggaaatgttgaagaaacggtttgtcatatcgtaatccttgaaacttccgaaattcatcgtgatcatctgaggtcggccaatctgaccgctttcgacaatctgccagagctttttgtagagcggcatatgccagattgtcatggcttctgccagaacaaggcccttttcatcggccagtgctttaagcttattcaattcactgctgttaagggtaatggatttttcggcaagcacatgtttgccgtgaagcagagactgacggataaattcatagtgggtgttgtggggtgttgtaatgtaaatgacatctacagacgaatcttcatacatttcgttgtaagatgtataaaccttttcaacatgatatttcttagcgaaagatacggctttgtcgttagttcggttgcagacaccgtacaatgtacggcccatattgtggagggcctgtgccatttcattggcaatcacgccggtgcccagtactgcccatttcaattcgttcattattggaagctcctttgcttatatttaacgaaagcaagcaccgtctgaaaaagacgatgcttgtatgtatttcaagattattatacaatttttttgtcatgatgacaaggaggatggactatttaagtctttttgctgttcctagaataacatccatgacatagtcataacccagagcagtatccagagacagatggtagttggcggaagcgccccatatctgtcttgtgtagtaatgataattatctgccctgcggcgttcctccttgagaatcagattcttggcttctttctctgttagattttttttgctcataacacgtttaattctgtttgttaaaggcgcatgaaggaaaacatttaggcaatccgtacggtctttcaaaatttgatcggcacagcgtccgacaatgacgcaatgacctttggcagcaatttcccgaattactttggactgggcgtcaaaaattttatccttcggtgattcggtttcagggaatgtatacatatgattaactaaatcataaagcaggctgttagtcagggattcctgatgttcaccgacgtaattggaagagtatccggtggttccggcagtcatttcaatgatttccttatcataaaaattatagccaagcttgtcggacagaatctgtccgagttcgcttccaccgctgccgtactgtcggccgatggtaataacagaggcgtattcagaggaattggctgttgtttttgcatttttaccagaagattcttcttcagcggatttggcataatcttccgggaacagaagcggtttgacgaaagccagagctttgccgaactgtctggcaataaaaccgactaaaagtgcagcgataacagtaccttcacggacgccatccagacgatgagccagtacaaatgaaagtacagcggcaatcacagccatggaaacatcaaaacagacttttgtgctgccgaattcacggttccatgtctgaacgatggcacgaacaaaagattcgccgggcagcatgacgacatctgccaggacttcaatatatacgccgaatcccagaatgacacatcctatcaatagaaaaataattttagacggataagattccggctgaacaaaagccagcagaatcatagtgaagtcaatgaaatagccgaataaaatggaaacaggaatctgaagatagtattccggtttgaaatttttgcggagaatcagcagttgcagaaaaatcagcaaaagactgaaaataatggtgaaattaccgagggtcaacggaaaattcaggctcagtacatatggaatagaagaaataggggatgtaccgagattggctttggtaattagacttacgccaagggaattgatgaacaatccgataagaaagataatgtaacgtttgagcttattcatggggtggtgtctcctttgttcattagattttcatatatttttgagaatgtttccataaaagcggcctgctcttcagagctgatatttctgaaggcttttttttcaatagaagcaaaattattttcgaccagatctttcagacgactgccttcatctgtcataaagatataaaacgtcctgcgattgccgtccagcatgcatcgctcaatgagtcccttttcttccatgcgattaagtacggaggtgagtgagccaggctcaatatggcaggcagcggcaatttctttctgattggcgccgttgtgatcccgaagataatccagaactttaggctgaccggaggtcagaccggatgacttaacttgttccatgaaatttttctgtatcatggaatgaacggccatggaaagataatgaaaagataaaggtgacataaaataatcctttcttgcggtaaatcgaaatgaaatcataagattctgtttcaaaatgttataattcaaacaattagaattataacattcaaaggcgagatgtcaatagaaaataaaaaaatacaagccggatagcttgaaattcgtaattaacaggtctataatactagagcagctcatagtttgggctgctttttgtacgccgaattttaaggcctgtatagcctcgaatgaaaatacaaagaaaatacagatgagataaagcattttatctatagagaaggagtgtgaataaatgagtcagtcttatgaaattgatatgtgtcacggaccgctgtttggaaagattatccgcttttcaattccattgatgttgtccggcattttacaactgctgtttaatgcagcagatattattgtggttggccgatttgtcggcagtacggcattggctgcagtgggatccaccagttcattgatcaacctgctgattaatctttttattggattttctgtgggggccaatgttcttgtggctcgttttcatggtgccggaagagatgatgaagtgaatgaaacggtacatacagctattactctgagtatgatcagtggtatttttctgttgattcttggcgtgactgtgacaagaacacttctgatctggatggggtcaccggatgatgttctggatcagtccagtttgtatctgaagatttattttctggccatgccggcgacactgctgtataatttcggcagttctatccttcgtgcagtgggagatacgaaaaggccgttgttctatctggtgacggcagggattattaatgttttctttaatctgttttttgttattgtttgccatctgggtgtagcaggtgtcggactggcaacggtgattgcggagtatatctctgcggcattgatcattcgctgcctgatgagaagccaggggtgctgccatctggatctacatcagctgggaattgttaaaggtaaattgcgtcagatcatgcagatcggccttccggcggggatgcagggggtcgttttttcactgtccaatgtattgatccagtcatccatcaattcctttggttccacggccatggcaggcaataccgcctctatgaatatcgaaaactttatttatatatccatgaatacttttcagcagaccgctatgagttttacaagccagaattatggcgctggcgaggaaaaacgaattcacaaggtgctgtttatatgtcagggactggtgatatctgtaggtcttattttcggtgtgggcgcatggcttgccggagacacactgctgtctatttattcatcggatcccaatgtgattcagtttggaaaggaccgaatggctgtaatctgtacggcttactttttatgcggcattatggatacaatggtgggtgcactccgcggtgtcggttattcgctgatgccaatgattgtttctctgatcggtgcctgcggcctgcgaattgtgtggatttttactgcgtttcagattcacagaagtctttggatgctgtatatttcctatccaattacctggattattaccggtggtgttcatattctttgttatattcttgtcagaagaaagcaattacagacggtaaagaatcggtaaaaattcaaaaatgatgtgtgtatgagaaaaaaatcagtacacataagaaactgaaaataaattatgtgtcaaaaatgacacgatattagaaataaaaacacataaatacaagaaaaacaaacgataaaatggctgaaaatccccattttacagcatgttaaaaagttggcatattatttgcttaatagttggtataagaaattatttcacaggtgaagggcaggcattatgtgagataaggaaagtggttattcaaaagagagtggatgatcacaatcagacaaataaaagggggattgctattatgaattttggtattcttgtgttattaattgccattattctctttgcattgctggcgtttaagcagttaagtgcattgattcttgcgccggtagtgacgattttcgtattaatctgttcaggtattccgattatggaaggcttgcaggatatgttcatgccggcggcagcagattacgtttctaagtatttcctgacattctttgtcggtgcattgtttggtgcggtttaccagtttacaggtgctgcagaatctattgcacgatttatcggcggcttatgtcatggtaagtttgtagctcctattatcatgtgtatcacaggtattcttacttttggtggtgtcagcggtttcgttgtattcttcgttatttatccgattgcactgaaccttttcaaggaatccaatctgacaagacggctgattccggctgcaatttcagcaggctgctggacatggtccatgtcagcaccgggttctccgtccattcagaatgttattgcgatcaagagtcttggtactttatcaacagcggcatttgtaccatctctgattgtatccattattgaattcctgttaatctttgtatggctggaatatcgtgcccgcaagttcacaaagaacggttattattttgatgatgcaagattaaagacacagctgtcagcagaagatttgaacattcagggacgtgaagatttgccgcactgggtaatcgcattcattcctattattctgattcttgttctgtttaatggctttcatcttgatgttgtgccatctgtattttcaggggttgcattagcagctattctgatgttcaaattcgtcaagggcggtattgaacagtgggtgaaagttttcaataaaggtgcagcagactccggtgttgccattttgaatacagccatcgttgttggtttcggtggtgttgttaagaatacacagggatttgcagatcttgttacagcattaaagggtatgtcaatgcctccacttgtattcgttatgattacagttgctatctgtgccggtgcctgcggttctgcttcaggtggtatgggtgttgcgtttaacgcactgacagatacatatcttgcacttggtgcaaaattaccttacattcatcgtatcgctacaattgcagcaggtacactggatactctgcctcaccagggtgctcagattacattgcttggtatctgcaagctgacacataaggaagcctactttgatattgcgattacacagattattatcccatttatcacatgtggtcttttcattgttcttgctcagatgggattataagaagtgtttagaggcctgattttaggtgtatttgaattgaataaacaagcgaataattaaaatgtgaatgtttcaaaagatgtctgatgacagaatgttgtcaggcatcttttgtcgtgctaaaataaaagcagtaatgattacgaacaggagggattcatatgaaggtttatgaaggtgcgattctgacgtgcgatgccaatgatcaggtagcacgttatcttgtagaagacggcggcagaattttatatgtaggagatgaattgccggaaagatatatctctgttcgtcatgagcggcttggaaagaaagcattgattccggccttcacggacagccatattcactttgcgagtttttccacatttcatgcaggattgaatgtcatgaatgctgacagtaatgaagagattctttcgatgctgtctgattttgcaaagaaaagtgaccagaagatgctgatcggttttggtgcatcaccctattcggttaaggaaagacggcttgtcaaccgaaatgagctggaccgggtttgtccggataaaccggttttcatggggaaatatgatggacatgcctgcgttgtgaatacgaaactctatgagcaggtgaaggataaagtgtcggggcttcgtggctgccatgcggatacaggggaaatgaatcaggaagccttttttgccatttcggattatgtgacgaattcgatttcagtaccacagttgttaaagaatatgcagaaagccattgattatatggcctctaaggggatcggaatgatccacacggtaagtggggtggggtttgtcagagatctggatgtggatttggagagatggtttggacgtgggctgaataacggtatgcagatgcgtgtctttttccagaccatggatgtgaagaaagtacagaaacggcatttgccgagagtgggcggatgttttgccactgcgttagacggctgctttggttcaaaggatgcagcgcttcgtgtgccttatgagaacagcgacagcaaaggtgttttgtactacagtgatgcgcaggtggcagaattctgcaaaaaggccaatcgtgccggactgcagatagagatgcatgccatcggtgatgcggcttttgatcaggccaccagagctttgaaagcggctttggatgattatccgcgggaagatcacagacatgccattatccatgcctgcctgccgacgaaagaaggcatcgatatctgtgagaaatatcatattttgttgccggtacagagcgcatttatagattggcctcaggaaccggatgaatacctggaagatattcttggcgagagaagtcagcggctgaatccgctgcggacatttacggaacatggcatcatgatgagtgccggttcggatggaccgtgtaccgacccggatccgattgaatggatgtatcgtgcctgcaatcatagtgtcccggaagaatccctgaccgtacaggaggcacttaaaatgtgcacgtataacggttattatacaaccttcgatgaaaaagaacgaggcagcctggaaaccggtaaaatcgcagatatggttattttatcagagaatccttatgagaaagatgtcaaaaatctccgggatattcaggttaagcagcttctgctgcagggacgtccgtacaagccattaaagggcagtgcgattagccaggttctgaagggtatgagaagcaggagcaaaatctaaatggacaatttaacattaaaagttatagccagaatttatacggattttggcgagaagtttggtgtgccgaggcagagtggactggttccggaactgaccgggaagataatatttgagccggaatatcgtgtgccggaggcactctccgggatagagggttattcgtggctgtggcttttgtggggattttcggaatcacccaggaataaatggtcaccgacggtgcgtccgccaaggctgggaggcaacaaaaaagcgggtgtttttgccacacgttctcctttccgaccgaatccggtaggcatgtcttctgtgaaaatagaggacattcagcttcagacagatgaaggacctgtgatcatcgtttcgggtattgacatgatgaacggcacgccaatttatgatattaaaccctatctgcctcatgtggactgtcatccggaggcacttggcggcttcagcggacagttcaaggattacaggctgaaagtgacatgtgcttcggaatttctgatgctttttccgtcggataaacgagaagcactgctgggggtactggcccaggatccgagaccggcttatcagaatgatccggagcgagtgtatggcgttaattttgccgggcgaaatgtgcagtttaaggtggatggtgatcggatgactgtttgcagtgtggatggatgtacgatataagaattgggtattggcaggaacatatagaattgaagcaaatgatatggaatcctgtgtttaatagaatgtgtccgaaatgaataaagaataaaaagacaacagggagtgacgacaatggagtatgtatatccggattattaccggcagtttacatgtatcggcggagaatgtccggatacgtgctgtgcgggatgggagattgtcattgatgacaaaacccttgaaaagtataagaaatatcccggcggtttcggtaatcgtctgcgcaattcaattaattttaagagaaaaagttttaagcagtatgacagaagatgtgctttcctaaatgaggaaaatctctgcgatatttatacggaagccggggaaaaactgttttgtaaaacatgtagacagtatccgaggcatgaagaagaatatgaaaatgtcagggaattgtcattgtctttgtcatgcccggaggcagcgcggatgattttgtcacaggacagattgaatctcatttatgatgagaaaaaagggcattcagaggactatggggattttgatgaactgcttttttcacagcttttagacggccgggatgctttctggaaactgatagaaaatgaaaacgtaccgatggcagtgcgaatgatacagatgctgtccatgggccatcatttgcagagaaatatcaatgcggggcagttgtttggactggagaatatatatgaccattatctttcagaaggggcggcagacaggatgtgtgcttatctgaaagaaagatgggaaaatcccggcagtcgctaccatgtcatgaaagagatgtttgcctgtctgcacaaactggaagtcctgtcagcagactggccgaagaaagtcagacattatgagaaggttttatttggcggcggcaggaaacaatacgaagcactgcaccagtaccggatgccggacaaaatagcagaacagctgctcagttacttcatttatgtatattttgcgggcgctgtctatgatggaatgccgtattcaaaagtcaaactggccgtcatcagcaccatgctcatcgaagacatggtctgcgccaaagcagcagaaaaaggtcagctttcctttgaggcaatcgctgatgccgctcatagttacgctcgggaagtcgaacactccgaccttaatctccaacgcctgtctatcatgttcagacaccggaaatgcttccatatcggacgcctgtgtggtgcattgttggaatggtaagtatttaaaaatgcctcttctacacaggtgcttctaacgcgtccggtacttaggtgctgttttttagcaccttatgtaccgctgacagcgttaggcagtgcgaacgtgcctgtgtagaagaggcattattaatttcgttctatgactaggggcagccactttgcgatttacaactgctccgcaatactgtaaatcagcgcctccgttttttcccagccaaggcaagggtcagtaatggatttgccgaatacgccttcgccgatcttctgactgccgtcttccagatagctctcaatcatgaagcccttgacaagctttttgatgtcatcggagtgacggcggctgtgcatgacttcgttggcgatacgaatctgtgccatgtactgcttgctggagttggagtggttggtgtcaatgatgcaggccatattctcaaggcctttttctgcatagttgtcatagagacggctgagattctcaaaatggtagttcgggatattgttgccgtgttcattgacagcaccgcggagaatagcatgggccagtggattgccgggtgttttgacttcccagcctctgtagacaaacatctgcgggctctgggcagcctcaatggaattaagcatgacggagatatctccgctcattgggttcttcataccgcatgggatgccgacaccactgcctgtaagacggtgaatctggtcttctacggagcgggcgcctacagctacataactgagcaggtcagagaggtagcggtgattctcagggtagagcatttcatcggcacaggtaagtccggtttcttcgatagctcttgcgtggagcttgcggatggcgatcaggccttccaaaagatccggctgtttctcagggtccggctggtggagcatgcccttgtagcctttgcctgttgtccggggcttattggtatagatacgcggtatcataatgattttgtcagcaactttctcctgaacccttgccagtcggtgaatgtattccataacaggctcttcactgtctgcggagcatgggccgataattaagagaaacttgtcggattcgcctgtaaaaacacggcgaatggcttcgtcgcgttcggctttatgttgggcgattttttcagaaatcgggaattgtttcttaatttcctgtgggattgggagtttgcggacaaactccatctgcatctgttcatgattcatgggtcaaacctccgttttgttgaatttatcttttatacaaatattgtaaaaatcaacgtaacatcattataacacagatgctttaagagttcaacgctttaaaccgagaaaaatacacgatggtttgaagttacaggaaaattttgtgcgttttgaattgtaatttgtcgaaataacagagatagacttgaattactataggaaataggagtataatcggataaataaacacatttgtaaaaaatgatgttaagaaaatatatcatggatgcaggacatagcaaagataaatggagggctgaagaatgtataaaatcgtatcaaagctgttaatgtacggcgatatgccgaagaacagcattttaatgcagttaagcgatattttcaaacagatggatcaggatacccagtcaagagatgaactggtgacacgcatttttacccaggtgaaacatctgcttcaggtggccaccgattatggtttcgataagaatctctggcacaattatctgacttatctgttgatcacagatgagaatcctttcagtttaacctgtgagaaagtcggggccaacgacggcagtgtcaacttctttgccaaaggtgattttaaggcatttaaggccttgtttgactttgatttttctgaaattgaagaacgtctggacattgattgctttacaaggctctcacagtacaaggctattggcaagaaagagttgatgtacaataagaatgttagtgagaaggtccagaccctcagtgaacggctggagaaaacagcgaatgaggatgaattttttgacgtggtgacggatttctacaaagcttacggtgtgggtatgttcggtctgaataaggcattccgtattgcgtcaagaacagagaatcatgtggaattctgtccgatcaacaatatggatacggtgatgttagatgacctggtaggttatgaaatccagaagaagaagctggtggataatacagaagcctttgttcagggcagaaaagccaacaatgtgctgctcttcggcgacagcggtacaggtaaatccacaagcatcaaggccattgtcaatgcttattatgaccagggtctgcgaatgatcgagatttacaagcatcagttcagagacctgtccaacgttattgcacagattaaaaaccgcaattatcgctttattatttatatggatgacctttcttttgaagagcatgaaattgaatacaagttcctgaaagcagttattgaaggcggtgttgagacaaaacctgagaatatcctgatttatgccacatccaacagacgtcatctgatcaaagagacatggaatgacaggaatgatatggagtacgagaacgatcttcatcgttcagacacaatggaagaaaaattgtctcttgttaatcgttttggtgttcagattagctactccaagccatctaagaaagaattcaatgaaatcgtcattgaactggcacgccgcgtgggtctgaccatgacagatgaagaactctgtgctgaggcaaataagtgggagatgcgtcacggcggtatttccggacgtacggcacagcagtttatcaattacctgcagggtacagtggagatttaagatgctgtatcggattacggacggcacactggccattggcggtgaaaatctcctggagcattttgattttgagatcaaggggcgggaacgcattgccattaccggtcctaacggttccggaaaaacaacgtttttgcggctgattgccggggagctgtttctggaaagagatgaccgcaggcagggtgagggcatttatctggcaagaaatgtgactattggcatgctgagacagcagatctttgagaatactgcccatacggtgcaggaagagatgatggtgctgtgcccttccagagatacctgggaccgggagcgcttcgaattcgagcaggaatatgacaggatttttactggctttggctttgcaaaagaagataaagaaaaacttttgtcggatttttccggaggagaacagacaaagattgctatggtacggctgctcctggaaaaaccggatatcctgttgttggatgagccaacgaatcatctggacatggagagtgtccgatggctggaaaattacctgcagaattattctggcgcggttgtcatggtttcccatgaccgatattttattgatgaaacggcagaaattgtctatgagctgacagataagaaacttgtacgctatgtgggcaattatacccagtttcgacagcagaaattaaagaatctggccatctggaagaagcagtacgagcagcagcaggcagaattggaacggctgaatcagctgatcgagcgtttcaagcacaaaccgaaaaaggcagcctttgctcgatccaagaaaaaattgatagagcgtatggagaaattgccgactccgccgacactggcagaacatatttttaccggggaactggtacctgcggtgatgggtggcaaatgggtagctgaggcagaagaattgaagattggttacgacggcaaggctattgcagaactttcattgcgcatccgacggggacagaagatcggcattatcgggccaaacggtgccggcaagacgacttttctcaagacagtagcgggacttctggcacctgtcaagggtaaatgtcagctgggacttcatatagaaccgggatatttcgatcagcagtcggcagcattgacatctgacaagaaagtgctggagcattttcatgacctttttcctgccatgccggagaaagatgtcaggaatgaactggcagcatggctttttgaaggggctgatgtgcagaaaacggtcagcgacctttccggcggtgagaaagcccggctcgtactggcagaaatccttgaaaaacggccgaacttcctgatgctggacgagcctaccaatcatatggatattccggccagagaaaccctggaatctgcttttagagtttacaaaggcaccatgctctttatttcccatgaccgttatttcattgaacaggtggcggatgcgctgctgatttttgagaacggtcaggtatcctattacccatttggatacaggcattatatggaacggctggagcggatgaatcaataccgggctgccggtgtttcagaagaagacgccgccgttgtcctgggccagatgagcgccgaggaccaggccctcattgcgggcttgaaaaatgtgccgaagggcgctacactgcttggacatgaactgtccacagaccaggcctttctcgactggcagttaagattggcagcagaagctatggcagatgcggctgagaaagtggagaattattatcattcggtgaagaaaacgaagcaggatgagtgggaaaagtggatagagcaggtatataccagtgaagacgagatatcggatgataattctgtgaaggtatatatggaatctgggcaggcagagacggatgctatggaaaatatatcatatacagaagaaaataatgtaaatgctgagggtcaggaggcagagatattaaataaatggtataagacctgtctggattggtatgacatctggggagaaatacatccttatgttgaagaacaaaaggatacattaataaagtcggcagaaattctaagcactgtgcattagtaaacgctaaaatataatataataagaatatcaatggaaaataaacaaacatcctaagtagacaaggcaaataaataaaatctacttaggatgtttttgcgttcagaagttcaaaatatgcagccttattatggggtagcttttagatagtcttaactagacagcgtttcttataaaaggcaataccatagcataaaatgtggtcgtattcatcttcatattctttggcatacattttctcttcaatctgctgcagagcagcgtcacaatctgattccatctgctcaagagattttgagtactttgcttcgaagacggcaacgcggctgttttcagtatcatagaccacaacatcactgcggccttcaccatgttccttattggattcaacgatataaccggctcctgcaaagatacctgccagaaaagcgtggtaataatcttcgagataatcatggtaactgatggtttttcgcagaagtttggtcatttcatcagtgattcgggaacagtctgtattccagacagcctgaaacaatgcctgtctgttccaggttcgggcactgtcgtcaaaccatttgataacggtagtctcaaagatttcacgaatttcagcgtttggaattttcagcgcatagacaccgtctgtctgaggggcggaaagctgtacgttatcggctctggtcagataaccggtcaggtaaagaatactccacagattatcttcggaagaatggagataatcataagtaagattttcatcgatgtgctgaagaatgtattcaccggagagcagtttttcaagctttttggtgatggtattgcctgcataatcaataaaagaacggataatggcattatcactggtgtttttccaataacttgaaggttgagcttgaggatttatctgcaaatctcggaggtaattcatcacatcccatggacagtagacgtcaaaatctccgaaatggtacccgtcgtaccagtattttacctgtgaagcatgtatttctgcatgtgcttttttgagaagtgtattgacatcattttcagtaaaaccgaaatattcattcaggcgggaatgactgatggtgtcggatacaaaattattagtgcctgtaaaaatgctttcctttgcaattttgaggcaaccggtaatcacagaaaagcagagattggggttatctttgagtgcggtgctcagaagcgttttaatcaggctgagcatttcggtataatacccatggctgctggcttttgcaagtggaacatcgtattcgtccagtaaaagaataaccggtttgtgataatacgttttcatcatgcgcatcagcagaaccagagaacggctgaggtgaattttgccggcagtacctgctttcaattcaagaaaaatctgtttatcatcgctgtctataatcggacaatcaagcaaatatgcatgttctttgtataaatcagcaatctgggcagcaagctgaccgtatgcgtcatcaaaattcagtccatccacatctttgaaagtcagaaagagtgtgggatattgattcatccatttctggcaggacgcagtatctttggaaatttcaagtccttcaaataaagtgtcactgtttttatgaatatcgaagaaagcagccagcatgctcatgccaagggttttgccaaagcggcggggccttgtaatgagagtgacttttgcagcagagttgtttaataattcggcaatcaggccggttttatcaacgtagtaatatccgttttgacggatttctgaaaagtcagaaataccaacaggaatattgaatgtttgcatcatgccagctcctttctgaaaaaataatcgaattcgatgatggcttcaatgtaattatcataccacagcagcggaggttttacaattacaggcagagtttgttgtcaggaataatatttactttttgaagcatactgatacaaaagacacattctacgtggaggcttatgtatgattcagaaagttggcaataattcaatgatttttgagaagccgccggtgattctggcggcttcttcggttgtaggggagaaagagggacaggggcctcttgggcagtattttgaccatgtggagaaagacccgaagtttggcatggagacatgggagcaggcagagagtaccatgcagttgatggcggcagagaaagcgattaaaaaggccggtttatccaaagaacaactggattttctttttgccggagatctattggggcagcttattgccacgtcatttggacttattgagctggagcggccggttttcggtgtgtatggggcctgttccaccattggagaatccctgcttctggcatccatggccctgtgcggcggtgcgggcaattatgcgctggcagtgacatccagtcattttgcaggagctgaaaaacagttccgctttcctttgccctatggcaatcagagaccgttatccgccacctggaccgttgtaggcagcggtgcagtgattgtggcagcggaggataaaaagggcagagcgatggcgaaaattacaggtggaactcctggacgcatcattgattttggtgtcaaggattccatgaatatgggggcttgcatggcaccggcggcctgtgataccatttgtcagcatttaaaggattttaacaggcagcccacagattatgatgctattatcaccggagatttggggaaagtgggacagcagattcttttgaaactggtggctgaacatggctatgatatcagtgacaggcatttggactgcggtatgctgatctttgacccggagagccaggatacccatgcgggaggcagcggctgtggatgcagtgcagtaacactggcggcctatctgctgccgaaaataaatcggggagaatggcagagaatactatttgtacccacaggcgcattgttgtcaacggtgagctttaatgaaggacagagtgtaccgggaattgcccacggggttgtgattgagaaaatctgattgaatgagtggataaaagctttcaagaaccattatatatgggaattgaaggcttttttttcaaaaaatttattgatgaaaactgtcagaacagagagtacttttgataatatataagtgttcagagataagcattgtgtgagccccatatgaaggatttgagcagatgttgtttttgaatgcattcgataaatatatgcatactatgtacattttgaagggaggtcgccatggatattactgaggacaattatgttgccggtctgcaggcgaaaaatgaaaaagcacttaaattttttattgaacacgacggatggattgtgaaatccattgtacataaaatgatggcgaaatatcaggataaacaggaggaatgtatgaatgatattttccttgcagtctggaaaaatgtggacagatataccggagaaaaggcgtcttttcgcacctggctgacagccgttgcaagatatcaggtgctgagtcatatacgggatatcagataccatgactatgtcagtttggatgatgtggagcctgttggggattcagatgtcaaaagccgattgtttgatgaagaagaaatgttggaattccaaaagttgctggagattctgtcggaggaagacaggcagatattcaccgcgcttttctggcacgaaaaaagctatgaggaagtcgggcaggagatgaatatgcctgtggacagagtctacagcagagtatcccgtggaaaaaagaaattgaagaaaaataacagatggttaggagggagcatatgaagaatatttatgatttgctgaatcaggcggaagataatgaggatatcctttctgaaaatgaacggatggaaatgtctgatattgaaaaacgcagaatttataacagaatactgctggattcagaagaagagcaggaagagcaatcatgtgatgagcagaaaaagtatcaagataatgagaaggcgtagcaagtagaaggtggacggaatatagaaagcgaagaacataaaaatcgacaggaacaggcaaaaaaaggtcgaaaggccaaaaaactgctgacagcggcggcctgcatggcggtgatttgtgccgttggctttacagcgggggcagcagtaaaggaatatctgtataaaaatacacagtccgattacagagagaagctggacagtacggactctgaagcagcagcggacaatacagcagataacgtaatagtagatacggcggacaatacagcagaaaatgcgatagatggtgtggatattcgtatgactgaggtcagaatgcaggaggatagcctgacatttgactgtacatttacttttgacggtgatatcagtgagatgcagaaggaaatggagcagtgggccataacagaagaaagaaatgccataggagatcagctttttgacaatgcggaagtttatgtggacggtatcaacgtattagatgatgattttaattatgttatttcacagacagaggcctttgttatcggacaaaatgtgtcatttgaagaaaataagatgcatataggatttttgatatatcaattgactgaaggcgaagaccacaccattcaattctgttttaatggtttaaacatgagtgatcatactttggagggcagttggaaatacacatatgaagcaaaagcggatgcgtatgaagcagaacttgaatggcaggatatttctattgaagccgagaatcaagaagaaaagataacgctgaaccgatatgcgctgacaccaaacggaccgaaaattgatgcaacggttgaggaaaagaaaggcactgactccatctatgaagaggatggttacactaaattagatttcatgcgaattgtggcatgggatgatctgggaaattattatctgatgtacggtaggtcaaaagactataatattgatgattcaacgattccatatcatcagaggttcactatttatgatggcagcaatggttcattggatggacaggaaaaccgggattacaaactggtgtgggatgaaaatgcatcaacagtgacatttgccatggagaaaaagacagataaatgggatgcagaaacaaaagaatttgctggtgcggattatgaatttgtatcagaaccgtatacggtggagttggtgaaaaactagtgaggtatagaactgctcaacaagtgtcaaacttttatggcattctagtacagagaaaacccgctgtaaaacctccaatataggttttacagcgggtttattataatgactgaaacttctaatcctcttccagtcctgccagcagtctgagattcttcttcagtatctgctgttcttcatcagggatatcagccagaatgtcgatattcgctgtatcgatagtatcgagaaccggtttctcaagggcagcccccttctctgtcaaaacaacttctatgtaacggcggtcttctatactgacctggcgttttaacagatccttcttctccatacgatcgagaatacctgaaatggttgaattttcaagtttcaactccgctgcaatttccttcggagtcgttttgtcacccttccacagacagtagagcacaccatattgaacaggggtaacatcaaagggttccaggcgtttgctgacttcctggaagaccctgtgctgagatgtggtgagcagatagttaatacattgatttaattccatgttgctccttttcttaatatacaaatagctttataacagttcgatgcattttgcctgcaaaaataattggcagacgaactgtttttagtttaaatgggttttggcggattgtcaagcaattccagagaaatttattcaattattataatgtccataaggttcaaaaagccgggatggggaatttataagttggtttgttgcaacaaaattgataccaggtacttcaattgaaagaaaaaaactcaatcattttcaatttttggcaaattatacaaatttggattgtgatttttgtgacaaaatcattcaaaaatggatagacaaaatgaaaaagagatattataataagcacatacacaaacagttagcgtaccaataattgtttgtgacaataattaattatgtatcataagtttaggaggatgctttatgaacaatttattaatggaagtcgaaaacgaggtagcagtagtaacaatcaacagaccaaagtcactgaatgcattgaatagtgaaacacttgcagaacttgaccagtgctttggcgaaattgcagaacgcaaagatatcagagttgttattctgacaggttcaggcacaaaggctttcgttgcaggtgcagatatttctgaaatggtgaatgcaacacctgctgaaggaagaaagatgggtcttcttgctaaagaagctttcttaaagcttgaaacaatgcctcaggttacaatcgcagcagttaacggatacgctcttggcggtggctgcgagatttctatggcatgcgacattcgtgtagcatctgacaatgctaagtttggtcagcctgaaacaggtcttggtattcttccaggtttcggcggcacacagcgtctcccacgtcttgtaggcaagggtcgtgcaaaagaactgatcttcacatgtgatcagattgatgctcaggaagcttacagaatcggtcttgctaataaggttgttcctcaggaagaactgcttgatacatgtaaagcaatggctaagaagatcatgtccaagggcagctatgctgtttctcttgctaaacaggctatcaacacaggtatggatacagatcttgcaagtggtcttacacttgaagcaaatctgttcggcttatcattctcaacagatgataagaaggaaggtatgacagcattccttgaaaaacgtaaagcaaacctgacagatttctaattggattgatctgagtttaatttaagagacggtttgacattttcggggcgaaatgcgcgggtcgtatttcgcctcacttagaaaagagagttgtttattatttaacataatgtttatgttgcgtgttatttaggagagagtatgaacattcacattttagtattagttattgcaattgcccttttcggtgtacttgcttttaagcagatgagtgcgctgattctggctccccttgttactatttttgttattttgtgttccggtctgccagttcttgaaagcttaaaaggactcttcatgccggcagcaacagattatgttactaagtattttctgacattcttcgttggtgccctgtttggtgctgtttatcagtacacaggcgcagcagaatctatcgccagagcgattgcaggtctctgccacggcaagtatgttgcaccaattatcatgtgtatcacaggtatccttactttcggtggtgtcagcggtttcgttgtattcttcgttatctacccaatcgccctgaatcttttcaaagaaggcaacctgacaagaagattgattcctgcagctatttcagcaggatgttggacatggtccatgtcagcacctggttcaccatctatccagaacgttatcgctatggatagccttggtacgccatctacagctgcatttgttccatctttaatcacagccattgttatgtttgcgttaatcttcgtatggctggaagtaagagcaagaagttttacaaagaaaggcatcgtatttgatgaccctacattaaaatttcagctgacagcagaagaactgccaaatcctgatgaagaaaaggatctgccaaatgttattgtagcaattctgcctatcattctgattcttgttatgtttaataatccaatgcatccattccctgttgaaacatctgtatttgcaggtgtagcactagcaacaatcctgatgtttaagagaattaagggtgttaatgaatggattggcgttttcaacaaaggtgcagcagattcaggtgttgctatcctgaatacagctatcgttgttggtttcggtggtgttgtacagaatactcagggctttaatgacctggtaacagcactgaagaatatgtccatgcagccgcttgtattcgttatgattacagttgctatctgtgccggtgcctgcggttcagcttcaggtggtatgggtgttgcattcaacgctttaaaagatacatatctccagatgggtgtttcccttccatatgtacatagaatcgcagctatcgcagctggtactcttgatactctgcctcatcagggtgctcagattacattgcttggtatctgtaagctgacacataaggaagcatattgggatatcgctgttacacagattttcatcccattcatctgctgtggtgtattcatcttacttgcacagttgggcttataagaaagaaaatattttcaagatggcttggaatatataatctgagacattgcagaaatcgaataaaagatgagaagtctccggattttcacttgaatgaagtgggaatccggagtttttttcgtggatgatgattgcattatcaaatgagcgtagaggaaaaatttatggatttggcaatcattttttgaaaatcctccggcatttcactggaaaaaacagcaaggtcctgatgccccggaagctggcaggtgatttcaaagctgtgaagcgccgcccggtcaaatccgagaaaaccttcatgtccgtaaatggagtctcccaacagcgggtgggacagactggccatgtggacacgaatttggtgggtacgaccggtctgaagctttaagcggacaagggaaaaaggtgtttcttcataggtaaattctgataaaacttcatattctgttcttgatggacgtccggtatcagcaacctggtagcggttaaaacattccgggactttttcaataggccggtcgatcaggcccgatttggactggtttgtccagtggccttctgccagagccagataaacccgggaaagggtatgatttgctcgctgacgttccagctgttgggcggcgtatttgttctttgctataagaatcagaccgctggtatccttatccagacgaccgatgggacagagcagcggctgttccggcagcagtcggtaataccaggccagataactcagcagagtatccgaataatgaccgtggcatggatggatcaccagaccggcgggtttgttcacaagcacgatatcttcattttcaaaaacaatggatacaggcccctcagcaggcacaaccttttgagtgcggtcattgggcatattaaaaacaagggagtccccggcatgaagcacaccccgtgtggtcacacgctgcccattgatcagaataccgttttcacgaaacttcaccgaacgcaaaaaagcccgggacagaccggctatattgcgggcataggcgtttaccgacagaccgtctgcctccggttcaattgtgtatgaaagctgccgcatgatagtaatttctccttttccaaattttgtgttttgagaagctggccaatgcacagttcaaatcgggcagcttcatccaagtgtacgaactcaaaatgatagtagtaatactatatcataaaattgaacaattggttaagtatgaagagaaaaattaaaaaagtttaaattgatgtcaaaactaaatagcgtgcagaaggttaacttcaaaaaggaaatccttagacgtttgttcatacaggtgcttccggctcggccagtacttaggcggctgcgaaggtattcgcaggcaccttatgtactgctgccagagccgggcagcgggagcggcctgtatgaacaaacgtctaaggatttcctttagagacaatgaaggctgcacgctgcttatagcttttgaatcgaaaatgtggtatgattaaggaaaaatgttttggaggtatttgagtatggcaacaccgcataatcgcgctgcaaacggagaaattgcaaagactgttctgatgccgggagacccgctgagagcaaagtggattgccgagacttatctggcagatgtccagcttgtcagtgatgtccgcaacgtgtattgttatacaggacaatataaaggtgtcacagtatccgtgatggcttccggaatgggcatgccatccattggcatttattcttatgaattatataaattctatgatgtggagaatattatccgtatcggttccgcaggagcctatacagataaactgaaggtattggatgtggtgctggcagatgctgtttggagtgaatccacatatggtcaggcacagagcctggatatgaagaactggcagtatccgtcagaagagctgaatcgacagattaaggatacagcattgaagatgaataagaagcttgtttcaggtccgattcattccagtgatgttttttatcatgaagcggatgccaatgatgtacttcgcaagatggttgatgaagaggggctgctttgcgttgagatggaatcttttgcgctgttccataacgcagaagtgcttggccggaatgcagcttgtctgctgacgatttctgattctcttgtaacgggggaagaactggatgcagatgcaagagcaactgcttttgcggagatggtagagctggccctggaagcggctattgcggtttaaacaggatgtctgcatcagggtttgggcgcagatcctgagtccggctgcagtgcaaaataaagaatgacatcaaagtgaggaaaagataagatgacagtaagagaaaaattggcagccctcagagagaagatgactgcttacaaaatggatatgtatctgatcggttcggaggattttcacggttccgaatatgtaggtgagcattttaaatgccgtgcttttatttccggttttacaggctcagcgggaaccatccttgtgacacaggattttgcaggactctggaccgacggcagatatttcctgcaggcggaggcacaacttgcggatacaggcattgaattgtttaagatgggcaatgaaggtgtgccgactattgaagactatattgtgtcacacattgaaaagggacagtgccttggctttgatggaagaacggtcaatgccagaaatggtcaggactatgtacgcagactgagtgaaaaaggagcgtctgtcaatggccgctatgatctggtggatgaaatttggactgagcgtccggcactttctgcagatcctgcatggctgttggatattgcttatgccggccagtccagagaggacagaattgccctgatccgtcaggaaatggcagagaagaaagcggactggtttgtactgacttctctggatgatattgcatggcttctgaatttcagaggcaacgatgtacaggataacccggttgttctggcgtatctgatgatgagtgccgatagtctgagactttataccaatgccgcagatttcaaggaagcggacagaaagacattggagaacgccggtgtagaattttttgaatacaatggcatttatgaggatgtggcaaaactgacagagaaccagaccgtgatctacgatggttcagcgcttaactatgctatacttgagagaatgccggaatctgcgaagaaggttgatgaacagaatctgacattgctgccgaaggccatcaagaacccggtggaagtagcgaatattcggcaggctcatatcaaagatggcattgccctgacaaaatttatgtattggctgaagaagaatattggcaaagtaccaatgacagaaatcagtgctgcagagaagatggaaagcttccgtaaagagcaggaaggctatcttgaacctagttttgaacccatcagcggatatgcggaacatggtgccattgtgcattattctgcaacaccggagacagatgccaagctggcgccaaagggattacttctgatggatacaggcggtcagtatctggagggaacaacagatatcacacgtacttttgtactgggtgagttgacagaggaggagaagaaattctttacactggtacttcggggcaatctgaatcttgcaggtgcgcgtttcctgcacggatgcaaaggttataatctggattatctggcaagagaacctctgtggcagatcggcatggattataatcacggtacgggtcatggtgttggctatctgttgaatgtgcatgagagtccgaatggcttccgctggaaaatgctgccgaatcgcaatgaaggctgtatcctggaggaaggcatgctgacgtcagatgaacccggggtttatctgacggataaattcggtgtgcggcatgagaatctgatggtctgcatgaagggcgagaagaatgaatacggtcagtttatgtactttgataccgtgacacttgtaccgtttgatctggatggtgtagatccgttattgatgacagagcgtgaaaggcagctgctgaatgattatcatcagaagatttacgaggtcatcggaccacatctgaatgaagaagaacaggcttggttaaaagaggctacacgggccatctaactgatgggatacatgctgtgcggcttttaatgagcaggagagatcaatgcagagaatatatttaaatgacaactggtattttgcaagaaattatacagaggatctgttgaacccggaggctgatctgtcagaacttcggaaggtgcggattccacacactgtgtgtgaattgtcctacagcaattttgatgaaatgtctgtgcagcagctttgcggatacagacgcagtctgatagtagaagatgcatggcgcggaggtcatttgatactgacctttgaaggggcagcccatgaagccgccgtctatgtgaatgggaagctggcgatgaaacattatggtggatatacagctttttcggtggatattgtaccgtttcttgcggatggacgtgaacaggtgattactgtgcgcttagacagcagagaaaaactgaatcagccgccttttggatcggtgacagagtcactgacttacggcggcatatatcgggatgtttatctggatgtgaaggatgaatattatatagaagatatttatacagccaccccggatgtcagaaccgatgaaaagatattaaaggcacaaattaagctgaatgcgtatacggaaggattgagactggccgctcatctggatacctggacagagatccctttggagggtgaagatcttcagcattgggatttaaaaacagcggatgtgcatttcagaacgtcctgtctgacctatacagtgccggaagcgatgctatgggatgtggatatgccgattctctatgtactgacggtggaacttctgaaagatggacagtgtgtagacacgaagaaggtaagagtcggattccgggaagctgtttttgatggagagggattctggctgaatggacgtatcctgaaattatgcggttttagcagatatcagagctggccttatgtggggtatgctatgccgaaatcaccgcagcagctggatgcggatttgttgaaattcgagttgggagcgaatgcggtgcggacgatgcaggggccacagtcgcagtattttatggacaggtgcgatgagattggcctgcttgtcattcctgaaattccgggctggcagtttatcggcgatacacggtggaagaaaattgctgtgagaaatgtccgtgaaatggtgatgcagtatcgcaatcatccatctgtgatcctgtgggatacgcgtatcagtgattctgatgatgaagatgcactttattataagacaagccgtctggccagagaactggatgtctatcggcagacaggcggtgagagagattttgcaggcagtcatttttatgaagatgtgtatttgtatgatgatatgagtgaggatgctgccagtgcttttatcagcagtgaaaatatcattcaggatttgtcgaaaacttgccttttatccgggcacagaagtctcaatgtgcaggtaaatggcggagcagggatagatgattggctgtgtcagaccatgcggcaggcaagcgtgtggcgggctgtggagagcaatgacagttttgcaggcagtctggcgcctgttatgacagattatccggtcagccgcaagtacagcggcagtgacggcatttgcagcagagggcttatggatgcgtttagaaatccgaagatggcggctgcttttttcaagagtcagcgggaggacgaaccagtatgtgcagcagttttgccgatggatgaccggcttatggtcatgaccaatgcagaccatattttactttactgtgacgaaaagctgattggtgaattttatccggatgaaacggtattcagagatctggtacatccgccgatttttgttgaacatctgtccgaaattgttcgtacaggagaaaaaccaaaagaacagaaacagaaaggaacatcaaacagagtctttttgaaaaaagaatccgagaaggatcaagagctgtttgttcaacagaaatccgagctggcattttccagaagatacgcggtgacatggcgcattgaggccatcaaagatgatacggttgttgccgggacaagtattacgccgacacctgaagtcagactgcagattacaacggatcgtcagcatatgatggaagaaagcagctacgatgcagcaactgtgcacattgaagctgtcggtgagagtgttcagcatctgtatggatatgagacgccgctggtactgaagacagaaggtgatattgaactgatcgggccgtcggtgattgttatgaaaaacggctttgcgggcacttatgtacgctcaatcggcaaagcaggaagtggacggctgatgattcaggatggacatggagaagcagttgtcgaattttctgtggaagtatagtgtatgaatatttattttgcaaattatgacagaaatggcatgacggccgttgaggagagcaaatatcagcatgctgtcggccgtcagctcttaaaaacagcacttctcagagcaggagtatccaaggatttcctgtcaaaagaagaaagtctgatatttgcatatgggccatccggcaagccactttttcacgatttgccggatgtccattttaatatcagtcacaccggcggattggtggtgtgtgcggtaggaaatataccgataggcattgatgcagaaaggatcaggccttatcccaaaagtgttcttcgaaaaatgacagatagagaacgcttatatattcagaaatcagataggcaggatgaggcctttatgcgtgtctggacgatgaaagaagcgatgatcaaactgacgggagatggacttgcggcttttgaaaggacagaatgtgtgccgggagaggtattgcatatgtacagcaagaggacggtgtgcgatgaagcggctgtatccggtgcgctgtcggatatttattgccgacagttggtctggcaggggcagtatgtcataacagctgttgaaaatacgaataaaaatcaggattgcatcttttcaaaaaaggtttacaatagactgtagcgttatacaggaggataagaagatggagtttaattttgccagtcgtctggattcctttgaagaaggtatttttgcgactttaaatgataaaaagaacgagctggtgaaggccggccggaaggtttacaatatgtctgtaggtacaccggatttcaaaccggcccagcatattatggatgcagtcagtgaagctgcttcaaagcctgagaattacaaatatgcattggctgatctgccggaactgttggatgcagtcagcaatcattatgcagagcgctatggtgttaagggcattcgtcatgaagaaattatgtctatttatggttcccaggagggaatggcgcatattgccatggcgatttgtgacccgggagatgtagtgcttgtgccgaatccgggttatccggtttttacagcaggccctttcctttgtggtgcaaaggtggaaacctatgacctgcatcctgagaacaatttcctgattgaattcgacaagattcctgaagaacaggcaagacgggcaaagatgatgattgtgtcctatccgctgaatccggtctgtgtgacagcacctgattctttttatgaagaactgatcacatttgcgaagaaatataacattatcattctgcacgacaatgcttattcggatattatttatggcggcagagtcggcaaatcattcctttcttttaggggagccagggacgtgggcgttgaattttattcattgtccaaatcctataattatacaggtgccagaatgtcctttgttgtaggcaatcaggcagttattgataagtttaaaaatgtacgttcccagattgattatggtattttcctgccggttcagtatggtgccattgcagccctgacaggtccgcaggacgcagtgaaagcacagtgtgaagaatatgatcgccgtaatcatgccctttcagaggggctgacatctatcggatggaaagtgcctctcagccaggggaccatgttttcatgggctcagattccggaaggctttgctaattccaatgaatttgtgatggaattaatggagaaaaccggtctcatagtgacaccgggcagcagcttcggaagccttggagaaggctttgtccgttttgcattggttttggatgtgccgaccattcaggaagctgttcggtccgtcaaagaaagcggaatattgaatagtaggatgtgatagaagatgtatgatgaattatctgaggcagatattcagaagatgaaggaagagattgaacaccgtaaggttgttgtccgtaaagaggcactggtggctgtcaaggaagccagggaacagggagatctcagtgaaaatttcgagtatcaggcagccaagagagaaaaaaaccgaaacgaaagcagaatccgctatcttgaaagaatggtcaagacagcaaaagtcatcaaggatcattccaaggatgatgaggtcggactgaataatacggtaacggtttattttgaagatgaagatgaggaagaaacataccgtatcgtaacgaccgtccgtgaggatgtgctgcatggtctgattagtattgattcacctgtcggtaaggcattgttggggcatcgtgtcggtgatacagtccatgtccaggtcaatgacaagtacggttatgatgtagaaatcagaaaaattgacaaaacgacggacgaaacagacgataaaatccgggatttctaaataggcagaacgcacatagagaaatcaataaccggtcaaaaaataattcaaacacaggccaggtgtttgaattattttttgaccttttttgtattttgagcgtactctgatgataaaaaagggcagatttcaacacatagaaaatatgaaaatttaaatactaagtaaatagatattttatgaaataggaggagaacagaatgcttgttgattatctgagggtttttataacaggcggcgttatctgcgcactggtgcagcttctgatggagaagacaaagatgatgccggggcggatcatggtacttttggtatgctcaggcgccattcttggcatgttgggaatttataagcctatcgttgatttcgggcaggccggagcaacggtgccgcttcttggttttgggtataacctgtggaagggggtgaaagaagctgtagacaatcagggatttttcgggctttttacgggtggctttacggcttcggcagtaggaatcagtggatcactggtgtttgcatttttggcatccctggtgtgcaattccaaaatcaagaaataagagcatgagctgaaggatttcgcaatagataaaaaagtataaataaagtgaatatcgtgtagtcaaaatctaaaaaggcttcaaaataacaaacaccatacaggatttgttatttgaagccttttaaattagtcttagactatgtgcaatgtttattgctcggcgccagtgttatcgccaccggaattgtcgccaccggaattgtcgccaccggaattgtcgccaccggagttgtcgccgccggagttatcaccgccggagttctcaccgccggagttctcaccgccggaattgtcaccgccggaattgccaccacctgaattatcgccgccggaattgtcagcaccggagttgccgttgccggaattatccccggacgttgtgtttgagccgttgctgccggaggacgatgatgagctgctgtcatcatcataactattctcgtaataacgatagctatgcttcgaacagtattccgtcggcgcagtatctttggcaaaatactcggtaatagcgttgcagccataagatgccaataaacctgtgctgctgcagacgcggagcttctcaacgtcagacggcatcacgaaatctctgtcctcatagccctcaaggacttcattcataatattcttccaaagtaccttgtgcgcgttgtagttgcgtccgagacggtagcgcatcagtgtgctgtcgtcataaccaaaccagataccggctgtgtaataaggtgtataaccaacgaaccataaatccttgtagtcgtcagttgtaccggtcttgcctgcttcggcaataccgtaattggaaatctgtgcggaagtacctgtacccttggatacaacgtcttccatggcacttgtcaggagccatgcagtagaatctttcatggctgtgtgcttctcaggtacattgtccagaagtacattgccgtccttgtccagaatcttgctgtaaaggataggctctgtatagacaccgccgttggcgatagccgcataagcacctgtcagttcaaggttcgttacaccattggagataccgccaagacccagaggtgcgtaagcatcccggtcttcgtccatggttgtaatgccaagattctcaagatattcaataccaagcttcggtgtgacatcttcaaccagccacttggtagtaacaacgttcatggagtaagtaatggcttcacggatggttgtcgttccctgataggagttggcattggtgttgaacggttggtagccgtcaggagttgtataaggttcatcttccttggtagatgccagtgaaagcccacaggaatccagagcaggaaggaaaacggcaatcgtcttgaaaacagaaccgggctgtcgtgtggactgggtggcgcggttaaagcttctgcttgtcttcttctcaccgcggccgccgctcaaggccagtacataaccggtagactgatccatcagaacgaatgaagactgtacctgtacagtcatatcaaagctctgggcgatgatatcgtcatcagtaatgcccttggcttcaagaaattctgcaatagactgtttggcctggtcttcgttgtcataaagcagatcacagtcatcagcgccataatagctctgcagagaattctcatcaatattgacggtctcaccgtccttgtctttgtaagtcagagcccagtggagtctgtactctgtggatgggaagttgtcatcatcattataatagctgtcgacaatatcctgaatgtgacggctttgtgtcagataaatctgaagaccgccgctgtaaagggcattgttggcttctgcggaagtatagccaagcttctcctgcaagtcatttagtacctgatcgatggcagcatcttcgaaccatgtatagatgatatccttggacttcgttgtctcgttgacttcggtaatacgtgaatagacatcatcagccttggcttcatcatactgctgctgtgtaataagaccaagggtcagcatattgttcagaatcttgtcgcgacgctgggcgttgatatccggataatcaatggggttgttgtaggaaggtgattgggcgatcgctgcgataaccgctgattcagaaaccgtcagatcgctgcacttcttattaaaataacgttccgcagcggcttctacaccataggcaccgcggccgaggttgatggtattcaggtaagcttccatgatctcgtccttggacatctctttctcaagcttgagagcgagataccactcctggaacttacgcttgaatcgctgcatcgtatctgtctcggcaccaccgttgaatacggtgagcttgatcagctgctgggtgatggtactggcaccttctgagaaattgccgccatgggaaagaccaacgaaaagggcacggacaatacccttcgggtcaataccgttatgttcatagaagcggttatcctcaatggctacaaaggcgtttgaaaggcacttgggaatatcctcgatcgacacgatcgttcgattggattgggcgcctaccagttcaatcgcttcctgtccgtcgggataatacatgacggacttgagtttactcggcatcacattgctggcggtaatgtcaggtgcactgtcgatgacccccttgaagccaccgatggcggcagcgataccgacaataacaataagcaaaatagcaagcattgtgaaacggaatatattgaaagtaatctttttcttggatttagcagcattggaacggattttcttgcgctttttttcattattctgtttactataatccattactgaacctccttcgtcctatcattatagcaaataagcttactgaaataaagtgtatttttttcgaaataataggggatagcataattttcaagaaggtgatagaataaacttgacaaaaagataaagtaaggaagttgagaatggcagaaatcaataaagtgaacaattacaagacagtgtacaggggcggtacagcagaaattgttgagaaaaagtcacgtttcattgcccattcggcgcatgtggaatcagaggaagaggcccttgcttttatagagcagataaaaaaacagtactgggatgcaaggcataattgccatgcattttccgttggtgtgaccaatgagacggccagatgcagtgatgatggggagccggctcagacggcgggcaaaccgatgctggatgttttgatggggcagcagctgaagaatacagttgttgtggtgacccggtattttggaggcacactgcttggcacaggaggtcttgtcagagcatattctgcggctgttcaggaaggattgaaggaaagtcttataatagagaagtttctctgccgcagggtgcggatgagcatggattatacaatgctgggcaagatgcagtatctggcggccaaactgaatctgatgattcttgataccctctatacggaaggtgttgaaatgcagctgcttgtgccggatacgcagtatgctgcttttataaaggaagtgacagaggccagcaacggcaaggtcgtgccggagtcggaggggctttgttacggcgcggatgtggaaggcaaaattgagatatttgatgcctgagtacgacatttaagaatttgaacaaactgtgaaatttgtataaaagcttttatttttctctattatgtggtataaataatatcattggatatgaaaggacgaattacaatgaagaaaagtttaaaactgggagctgcatgcctcggcgtagctcttttattgtgtgcatgcggcaaaggaagtgccaatagtacagacactgctgcaggcagtgagacagaatcagcagcgcagtctgcatcggaatctgcctcagagaccgaaacagagactgaagatacgaacgcttatgcgtatgattatgatgttgaatccctggtcaagctcggtgattacaagggattgacttatacagagacagatacatctgtttcagatgaagaagtggaatcacagatcaacagtaccctgacagcccatgcaacaccggagcagatcaaggacagagccgttgaagacggtgatacagtcaatattgactatgaaggcaagattgatggtgagacttttgaaggcggtacagcctccggtgcatcactgacaatcggttctgattcatttattgatggttttgaagatggtctgatcggtgttaagccgggtgagaagaagactttgaacctgaagttcccggatgattacaagacgaacccggatctgtcgggcaaggcggttgactttgatgtaacagtgaactacatcgaaggcgatgacattgtgccggaactgacagatgattttgttaaggggctgagcattacagatgtttcaaccgttgatgaatatcgtgcttatgtgaagtcacagctgcagacgaacaaggaatctgaagcagagagcagcaagcagaaggaactgcttcagcaggctgtggacaatgcagagatcaaagaaatccctgaagaactggtaacagagtattctgcacagtacacaagttattatcagcagtatgcgtcctacttcggtatggaattttctgatttcctgacacagtatatgaatcagacagaagatgatttcaataaggatgcagcagattacggcaagcaggttgcaggcaatatgctggttgtatgtgccattgccaaggctgagaagatcgatccggatgccctttatgatgagaaggtggctcagtatgcaaagcagagcggttattcagatgttgcaactctggagaaggattacagccagaagtatctgcgtcaggtgatcattaatgaggaagtcctcaatgttctggaagagaatgcagttgcagttgctccgacagagacagaatcagaggcttccaagtaagcgctcagcgtgggaatgcatattatttacaatttttttttgaacagtgtattataaaaaactttgcattttttggggaacatgctataatgtccataggcaataggcactgaacgtgttcggctcgtttaaggacagacagtgtgaggcaggagcaagagaggtgtagaatatggattttatgtcagtatttcttccggttttaattctcggagttgtcatcgttgcggttctggtagttgttgcaaccgttgcatcagctgtttcagcggctgctgttgaagatgatgaggaagacgaatagaatcaattgaatgaatgcgaatgatgaggggatgtatgtctttgagcagcatccccgaattttttgcgttattttaggcgtgtcgggcaagcaaagcggtgtgtcacgcaatcaatcaggaaacggaaaaagcggacccttctggatccgctttcccggcgtttgcttcagtcatcagctgcagtctgcaaatgccgcctggggcggctgattgggaatggcagctaatggattgtgagattcagttactgcataccgccgttggccatctgttcttcctgacgcttgatcattctccgaaccatttcaccgccaatggagcctgcctgggcactggtaagatcaccgttgtaaccctgtttcaggttcacaccgatttcgctggcaacttccattttgaatttatccattgcgtcttttgcctgtggtacttccattgtagaactagaattgtttgtcattgtgacacctccgttttttggttcgttttatcctgtatctgaaaggacaaacaagacttgctttttgaagtgtttttgtttatcctgttactagtatgtgaatgacgtacagaaactatgagtggaataattaggaggttttgagtcgttttatggaaatagagcgtaaatttttaattcaaaaaatgccggagcatccggaacaatacaagagccatctgatcgaacaggcctatctgaatgtgcgtcctgttgtcagagtacgccgtgaagatgagaattattatatgacctacaaaggcggcggcatgatggccagggaagaatacaatctgccgttggatgcagattcatatgcccatcttcttcagaaagcagatggcaatattattaccaaaagacgttatttgataccttttcatgcctatacaatagagctggatgtttttgaaggcctgtttgaaggcattgttgtggcggaagtggaatttccgagtattgaagaagcggaaagctttgcggcgccggaatggtttggtgaagatgtgacttatgacggccggtatcataacagtgccatgagcagaatgaaagtggaagagattgttgagatacaaagtcttttggcatcagaaggaaaatgatcaggtgaaaatagtcagacaaagcgaatattaagagatgagaggttttttatatgaatacgaaaaataaagccattgtgtgtattttgatttcagcatttggcttttcaattatgaatttatgcgtgaagctgtccggtgatctgccgtctattgaaaagagcttttttagaaatcttgtggcagcgattattgcgtttatcttattatatagaagcaaagcgggtttttcctgcaagaaagagaatctgccggcattgattttgcgcgctgtacttggaaccattggtattttctgtaacttttatgcattgagccatatggtgctgtcggatgcttccatgttgaacaagttatcacctttctttacactgatcttttcctacatcttcctgaaggaaaagttatcacccttccagtgtattgccattgtgatcgcttttatcggcagtttgtttatcatcaagccatcttttgatctgacagccacatttccggcgctttgcggcttcatcggcggtgtgtgtgccggcggtgcgtacacctgtgtgcggtatcttggtattaaaggtgaaaaagggcctttcatcgtgttctttttttcggcattttcatgcctggcggcattgccgtacattatcttttccttcgaaccgatgacactgcagcagtttctgattctgatcggtgcaggcgcaggcgcagccgtaggtcagtttggcatcacagccgcctacaagtatgccccggccagagaaatctccatctatgattatacattggtcattttcgcagccatctggagtttcctgttcttcggcgaattgccggattggatcagtatcattggatatgtgttgatcttcggtatgtcagcattgatgtttttctataataaccgtcatgcggagtcggcgaaataatttaaaaatgttgtaactgttctgagctaacattcaaaatgctacgcatttcgtcggtgtggcgtatccgccaaataaaatttcaaaaacagtattgacaggtgcagcatttaattgtgattatgaatgaaatcgggtataatgaacgatataaaagagtaacgggaggaatttgcatgggtagttatttgaatccggggaatttttcatttcgcggaagtctgcgctctaaaatatatgtagacaaaagtaagttgattgcaaagacaaatgaagttctttgtacagaacagaagtatatctgtgtgagccgaccgagaagatttggcaaatcaatggcagccaatatgcttgctgcatattatgaccgaagcgaaaatacagaagatttatttcaaaatcttgcaatcagtagagaaaaatcatatgaggaaaatctgaatcaatatgatgtaataaaaatcaatatgcaggaatttttgagtatggcagggacaatagaaaaaatgttggaaatgctgaaagattatcttgttgtggattttgaggaagcgtaccctgaggtgcgttttcgggataagaataaccttattcagactatgaaagatgtattttcttataccaaatgcccgtttgtgattctgattgatgagtgggattgtctgtttagggaatataaacaagacaaagaagcacagaaaaagtatctggattttttgcgcgcatggcttaaagacaaagattatattgcaatggcctatatgacaggaattttgccaatcaagaaatatggctctcactctgcgctgaatatgtttaccgagtattcgatgacagatcctggggaattggcggaatattttggctttacagagccggaagtgtcagcaatttgtgaaaaatatgggatgagttttgaggaagctaagacctggtatgatggctatcaattggttgctcatcggcagtggaaagatgaatgttattccatgtataatcctaaatctgttgtagaagctatgctgcgtcataagtttggaacatactggaatcagacggaaacatatgaggcgttaaaaatttacattcagatggatatggatgggttaaaagcttccgtaattcgtatgctggcaggcgattcagttccgattaataccggaacattcagtaatgacatgactacatttgcaacaaaagatgatgtattaacattgctggtacatttggggtatttgacgtataacagtatagatggaactgtgagtattccaaataaagaagtttcacaggaatatatcaatgcgattagtacaatgaactggcacggggtagcggattcggtggaggcgtctcgaaaattgctggaggcattgtggcagatggatgccgatgccgttgcggcgggaatcgaaaaagcgcatgaagagatatcgattcttcaatacaatgatgaaaattcgcttagttgtaccattcatcttgcgttttattttgcacgggaatattatacaatgattcgggaattacctgcgggaaaaggatttgctgacgtatgtatgattccgagaaagagatatgctgacaaaccggcaattgtgattgaactgaaatgggacaagagcgcagctggcgcattagagcagattaaagggaaaaactatggaaatgcattgaaagattatcagggaaatttattgctggttggtgtcaattatgataagaaagcgaagaagcatgaatgcgttattgaaaatgtgaagaaataaaacagtaggctcatgcctggcagtaaggatgctggacatgagcttttttggttgatatcactgcagattgattacggacaatatagaaaggatagctggccttttatcgattggtttaccataacagccgtttttttatgttttttttagaaaaaagtggctctcccctatttacatatgcccggatgtataatatacttaaatccataagcgcttgaaaacaggccgactccgcactttggagggaccggtttcgggatagatgaaggaggatattaatatcatgagtgtacaggtagagaaattagaacataatatggcgaaactgacaattacagttccagctgaaactttcaataaggcgattacacaggcttacaagaagatgaagaaccagatctccattccaggtttcagaaaaggtaaagtgcctcaggcaatggtagagaagatgtacggtgcaggcatgttctatgaagatgctgccaacatcgttattccggaagaatatgacaaggcacttgcagaagtaaaggatatcaagatcacatctcagccagccatcgatgttacacagatggaaaaaggcaaagatttcatctttacagcagaagttgctactaaaccagaagttacacttggccagtacaagggtatcgaagtacctgagaataaggtagaagtaacagacgaagaaatcgaagctgaactgaagaaagttcaggaacagaacgcaagagagattacagttgacagaccagctgagaacggcgatacagttgttatcgacttcgaaggttctgtagatggtgaagtattcgaaggcggtacagctgagaaccatcctctggtacttggttcaggttctttcatccctggattcgaagaccagcttgttggtgcgacagcagattctgatgtagaagtaaatgtaacattcccagaagattaccaggctaaagaccttgcaggcaaagctgcagtattcaaagtaaaagttcatgagatcaagaagaaagaacttccggagatcaatgatgaattcgctcaggatgtatctgaatttgatacacttgatgaatacaaagaagatgtaaagaaaggcattgcagaacagaaagaaaaagctgtacgtcaggagaaacaggagaagattatcagacagatcgtagagaacgctgagatggatattccggatcctatggtaattactcagacaagacagatgatggatcagtttgctcagcagatgcagtccaacggtctttctatggctcagtactatcagtttacaggcctgacaccggacggccttcttgaacagatgaaaccacaggctcagaagaacattgagaacagacttgttcttgaagcaattgctgcagctgaaggcatcacagcaagtgaagaagaagttgagaaagaattcgcgaacattgctgaaagatatggtctgacagtagacaaggttaaagaaatcttcgctgacgaagaaacagagaacatcaagagcgatatcgctgcgcagaaagcacttgacatgatcacagaggctgctgtagaagttcctgtaactgaagtagaagcaactgtagaagacgcagaataatcataacgtaagatagcagggctgccgcagagaagtttgccgcagccctgtggtgttgaatcagtctaaacagcgttttgactgagtaaagtgctgacattgacagatatgcggggcatatctggtttgacaggaggataaggatgagtttagtacctacagtcattgaacagtcaagcagaggcgaacgtgcctttgatatttattccagacttttaaaagacagaattattttccttggagaagaagtaacggatgtatccgccaatctgattgtatcacagctccttttccttgaatctgaagatccgggtaaggatattcagatgtatattaacagtcccggcggttctgtatccgcaggtatggctatctatgataccatgcagtttattaaatgcgatgtatcaacaatttgtatgggtatggctgcaagtatgggtgccttcctgctggcaggcggtacaccgggcaagcgtctggctctgccgcattcaaccatcatgatccatcagccatcaggcggtgcacagggacaggcaacagagattcagattgttgctgaccgtatccagtacacaaagcgtatgctgaatgaattactggctgccaatacacatcagccactggagaagattgcagcagatacagaaagagactattacatgagtgcagaagaggccaagaattatggcctgattgatgctgtagtaaccaagcgtgcataggcaagtcttgaagtaaaagaggtagtatatggcaagtcgtattgatgacaagaagcagccaagatgttctttttgtaataaaacacaggatcaggtccgtaagcttattgcaggtccgaatgcatttatttgtgatgaatgcgtagatatctgcatggagatcatcgaagatgagatggaagaggatcagaacgatgcggactttaacctgctgaaacctgttgagattaagaatttccttgatcagtacgttatcggacaggaacaggccaagaaggttttatccgtcgctgtttataatcattacaagagaatcgcatccaacgccggcaatgatgtggaattgcagaagagcaatattattatggtaggacctaccggttccggtaaaacacttttggcacagacactggctaagattttgaatgtaccatttgctatcgcagatgcaacagctctgacagaagcaggttatgtcggtgaagatgtggagaatattctgctgaaactgattcaggcagcagattatgacattgagaaagccgaaagaggtattatttatatcgatgagatcgacaagatcacgaagaagtccgagaatgtctctattacaagagatgtttccggtgaaggtgttcagcaggcacttttgaagatcctggagggtacggtggcatctgttccgcctcagggcggtagaaagcatccgcatcaggaatttcttcagattgatacaacgaacattctgtttatctgcggcggtgcttttgatggcctggacaagattgtcgaatcaagaacaggcggtcagtccatcggatttaatgcagatattcatgtgaaggaagaagagcagaatgtcagtgagctgatgaaacaggcactgcctcaggattttgtcaaatatggcctgatccctgagtttgtaggtcgtgtgcctgtcagtgtatcccttgatctgctggatgaggatgcccttgttcgtgttctgacagaaccgaagagtgcgatcatcaagcagtacaagaaactgttccagctggatggtgtggatcttgagtttgaagatgaggctgttcatgaaattgcccatcgctcattcatgagaaataccggtgccagaggattacgttccattgttgagaatgttttgatggatacaatgtttacactgccgtcagacgaaacagttgagaagtgtattatcaccaaagctgttgttgatggacaggcagctccagagctggttcacggtgagccgcagctcccatctaagaagggacagacgaagaagtcatcccgcaagaacagcggagaaatcgcataggattcacaaggctgccggttgaaatgatacggcagcctttttatgatagaatttggaagaatttagggccagatacagaaaacagacaaatgaaatagatcaagcaaccaatgataagaaggtgaacaaaagagatgagtgatattaactgcagaatgccggcagtggcattgagaggacttgtgtgtctgccggatatgatcctgcattttgatgtaagccgcaagaagtctattgctgcattggaagcagccatggtcaaagaccagatggtttttcttgtggcacagaaagatccggatgaggaagatccgaaacaggaagacctttatacggcaggtgctatggcgaaggtgaaacagatcgtcaagatgcctgagaatatggtccgtgttgtggcagagggcaaattcagggcagaactggacgagatgatttcggtgtctccttatttgctgacggatgtcattattcatgacagagaagaaaaggtggagaatgagaacgaggcagaggctatgcgccgtgtccttgaggaaatcgttcagaaatttatcgatgccggtgccaagtttggtccggagatcacaagacagatggaacaggcagaggatattgttaaactgacgaatcagctctgtgccaacatgccgatgcgttggcaggatagacagacattggcagagaagatggatttccgtgagcggtatgaagaattatgccgtatcatggagaaggaatacgatgttcttctgatcaaccaggatattcagaacaaggtcaagagccgtcttgagaagaatcagcgggattatgtgctgcgtgaacagatgaagctgatccgtgaagaactgggcgatgacatgcagtctgaaatcgatgagtatgagaagaaactggaagaactgaaggcaccggatgttgtaaaagagaagcttgagaaggaaatttcacgctttaaggcatccgcaggcaattcagcagagacaggtgttctcagaacctatattgatatattgtttgaaatgccatggagcaagacaagccgtgataacaagaatattgacaaagcagcgaagattttgcgagaggatcattatggactggaaaaggtcaaagagagaattcttgaattcctttccgtcagattactgacgaaaaagggagacagcccgatcctttgtctggtgggcccgccgggaacaggtaagacatccattgcacgttctattgcgagagctttgaacaagaaatatgtccgcatcagtcttggcggtgttcatgatgaagcagagatccgaggacaccgaagaacctatatcggtgccatgccgggacgtattgcgtccggactttctcatgctggtgtaaaaaatccagtcatgcttttggatgagatcgacaaagtcagcacagactataaaggggatacattttccgcactgctggaagtgttggattctgagcagaacagcaagttcagagacaattacctggaacttccactggatctttctgatgtgctgtttatcgcaacagccaatagtttgtccaccattccgcgtccgctgttagaccgtatggagatcatcgagatcaatacgtatacacagaatgagaagcttcatattgccaaagagcacctgatcgagaagcagatgaaagccaacggcatcaaggcgaaacagctgacaatcagcgataaggccattgaagatatcattctctactatacccgtgagtccggcgtccgtggtctggaacgctgtctgggcgatatctgccgaaagacagcacgcatgatcctgcaggacggcaagaagaatgtcaaagtgacagagaagaacttggaacatttccttggcacgaagaaatatgattatgagatggccaatgcgaagaatgagattggcatcgtccggggactggcatggaccagtgtaggcggtgataccctttctatcgaggtcaatgtaatgccgggcaaaggcaagtttgaactgaccggacatctgggggatgtcatgaaggaatcggccatggcagccatcagctatattcgttctgtcagcgaccagttcaatattgacagggaattttttgagaaaaatgacattcatatccacattcctgaaggggctgtaccaaaggatggtccttcagcaggcgtgaccatggcaacagcgatgctttctgccattacaggtactccggttcgtgcagatgtggcaatgacaggtgagattaccttgagaggccgtgtgcttccaatcggcggtcttcgtgagaagtccattgcggctaaggtggcaggtattcacacagtgattgtaccggagaaaaaccgaagagatatcaaagaactggacaaagagatcacgaaagatctgaagtttgtttatgcatccacaatggcagatattcttccggtggcgctggagagtatgccgaaggcacaggcagcaaacagttaaggttttggcaggagaagaagaatggttataaagaatgtaaatctggaaacagtatgcggtattacaagtacgctgccggaaaaccagcatcctgaggttgctttttccggtaagtccaatgtaggcaaatcctcactgatcaacggtctgatgaacagaaaagcctatgcaagagtttcccagcagccgggcaagacccagaccatcaactattacaatgtgaatgatgagatttatattgtcgatcttccgggttatggttttgccaatgtttcacaggctgtcaaggcaaaatggggcaagatgatcgagaattatctccgaaaatccagacagctccgcatggtctttctgttagtggatatccgtcatgaaccgtcagccaatgataagcatatgtacagttggatcattgaaaacggtttttatccggcgattatcgccacaaagctggacaagatcaagcgaagtcaggttcagaaacaactgaagatgatccgtgaagggctgaatgtagcagaaggcacaccgattgttccgtattctgcggtgacaaagcagggccgtgatgagatatgggaactcatcgaaacttatgcgatggcgcctgaggaagcactgaatgaggatgagtaaaggttatgttgatgcatgattgccgaattgaccgtcactttttagacaacttataataagtgtattaaatattacaaataatgtggcatagcctccctggttttggtataatattaccaaagaaggggggcttttttatgaagctgtttttttcgggagcggcacatgaggtaacaggcagcaagcattatctcgaagcggcaggcaagaagattctcattgactgtggtatggagcaaggcaagaatctttatgagaatcaggaaattccggttcctgcttctgatgtggattacgtttttttgacacatgcccatattgatcattcgggaatgctgcctttattgtataatcaggggttcaaaggtagtgtttatacaacagaggcaacgcagcagctctgccagatcatgttgcttgacagtgcgcatatccaggaatttgaagcggagtggaagaaccgcaagggcaagcgtgcgggcataccgccgattgtaccgatttataccacggaagatgcggtggggattctgcagtattttgtaccatgccggtatgaggagaagatacaggtatgcgaagggatagaaatccgttttgtggatgcgggacatttgctggggtcagccagcatcgaggtatgggtgacagaacagggtgtgacgaagaagcttgtattttccggtgatatcggcaatacgaatcagccgatcatcaagaatccacattatattaaggatgcggattatgtcattatggaatccacgtatggggacagaagtcatggcccgcgtccggattatattaaggaattgacagcaatcatccaacggacatttgaccggggcggcaatgtagtcattccttcctttgctgttggacgaactcaggagatgctttactttatcaggcagatcaaggcggaaggccttgtgaagaaccatgataattttgaggtgtatgtggatagtccactggcagtggaagcaacgaatgttttcaacaggaatgtaccgggatattatgatgatgatgcgatggcactgatcaaacagggcatcaatccgatcagttttccgggtctgaagacggccgttacaagtgatgattccattgcaatcaatgtatccacgacaccgaaggtgatcatatctgcttccggtatgtgtgatgccggccgtatccgtcatcatctgaaacataatctgtggcgtccggaatgtacgatcctctttgtcggctatcagtccgtaggcacactgggacgtaatcttgtggaaggcgcgacggaagtgaagctttttggcgagaccattgaagtacaggcagagatcacttccctggcaggcgtcagcggtcatgcagactgcgaaggcctgatgaaatggatcggagcctttgagaagaagccgaagagagttttcgttgttcatggtgaggatacagtgacagatgtatttgcagccaggatcaaagacgaattagggattgatgcagtagcaccatataccggtgcggaatatgacctgttgacgaatgaatgtctgcaggctccggaaccggtacgagttacgccgaagaaggcgatgcagcgcaaggcagcgacagtctttgaacgtctgcttaatgcaggacgccgcctgatgcttgtgattcgccacaatgaaggcggaaccaacaaggatctgacccgatttaccaatgagatcaataatctctgtgacaaatgggatcgttaatggtatcctatcataggtaacagagacaaccaatcataaaatcttcatcagctgaatatatttcttaccagaggtgatgccaatggatagaaaagagcagctgatgaagattttttccgttcatatcagggaaatattgacggcattgccggtgcatataggcagacttcaggaaatccggctgcgggcgggcaggcctttgatgattttatatgataacaaagaatatctggcaggcccggaaggtaatattgtgacagaatcatcggaagcttatcatgtttcggcccaggaaattcaagagacaatgacgtatctcagtcattattccatctatgcttatgaggaggaaatacgacagggatttctgaccattcaaggcggacatcgggtgggcatagcaggaaaagttctgtcggatggaaatggtatcaggagtatacgtcctattacatttttgaatgtccgtctggcccatgaggtcaggggctgtgccgatgaattaatgccctggctgtatgaagagggcagaccctgcagtacattaatcctgtcgccgccgggatgcggaaagacaacgatgcttcgggatgtgatccgacagttttccaatggctgtggacaggaagcgggacgaagagtgggagtggtggatgaacgttcagagatcgctgcctgctatcgcggtattccgcagaatgatatgggtattcggacggatgtgctggatggctgcgccaaacatatgggtatgcaaatgatgctgaggtccatgacaccggagattctggcggtggatgagatcggcagcaggacagataaggaggcgatagacgctgtcatgaattgcggttgttgtctgctggcaacggcacatggcgcttcgatggaaaaaatgcagatgcggccggcccttcggcagatggctgaggaaaaaatatttgaacggtatgttatactcagccgaaagaataccgtcggcaaagtggaggctattcttaatgcagacatggattttctttatcaaaatcatcggggcgatctgtgtcatgacaggatgcggcggagcaggactggctatgggcgtctcctggaagaggcgctatgtacagctgggacagatgcagcagtcacttagaatgctgcatggtgaaatcaggtatacaggggcagaacttccggaagccatcgatcagatagcccttcgtcaggaaaagcccttctcagatttttatcatggcctatcagagcaaatgcgccgaatggatgggcaatcattgaaaactttatggcagacggaaattgaaaaatgtctgaataacacctatctgacaaaggaggataaacagatttttctggagtccggcagtcagcttgggtatctggaccgacagatgcagctgtcatccctggaagcctgtatggcacagattgaagacaatcaaaatatgattcgaaaaaatatgaaggaaaaacagaaactcagtattgcacttggacttttgtccggtttttttattataatcctgttaatatgatttttccgggaggtccggtatgacagtcaatgtaatttttaaaatagcagccgtcggcatccttatttccgtattgaatcagatattgaagcattccggcagggatgaccaggcttttctgacgagtcttgccggactgattcttgtattgatgtggattattccgtatatttatgaattgtttcaaacaattcagcagctttttgcgttatgaaaggcggctaaatggaagtgatcaaagcagctgtcatggggatcgcggccgccatgctggctttatatatgaaatctgtccggccggaatacagttcgatgatcagtataagtgccggtatttttatttttggttttgcactgatctgtcttcagaaaattaccggaagtattcagactctgggagaatatctggcagtcagcccggtctatataagaattcttctgcggatcacaggcattgcctatatctgtgactttgcatcatgtatatgcaaagatgccggctatcaggcgattgcggcacagattgagcttctgggcaaattgacgatcgttgttatgagccttccggtactgcagacattgatgagcgccattacggagtttattggagcctaaatggagagatggccaaaaattaaaatgtggaaatatatcctgagaaagaaaatgctgtatggtatcggttttgtgtgtgtccttattggaatgacagtcactggtgtttgcataaagcctgcaaaagaagtacaggcatcaatcagtcatgaagctgttaaagacatcagatcggatgctccaggagagggagagggtgtttctgaacagccggagggtgaaaacacggacgataaggatgatccgttggacatgctgggagatctgtctgaaatagaggctgcggtttcggaggcaatgaccgtcaggtcttctgtatctttcaaagcgattttaaaacagctgatgacaggaagcctttctgaggccggacagcttttgtttcagatgatccgggaacaggtggccggtggcatttatgagaatcagcagctgttattcaaaatcgcctgttttgcagtgatcggtgcgatatttacgaattttgccatggcattttcaaaagaacaggtggcggaaaccggtttctatctgacttatacactgttaatgacactgatgatgacgtcttttatgatgacatctgccattgtccgtgatgtattgcattcactgacagaatttatgaaagtgctattgccgacgttttgtacggccctgacatttacaacgggcagtctgctgtccggtgcgtattatgaattgatgatgattgctattgctgctgcggactggctgatgagttctttgattatgaaaatgatacaggtgtatgtactgacggccctggtcaaccatatttcaaaagaagattatctttcaaaactcagtgaattgctggcactgctgatccgttggagtatccgcaccgttgtgggtgttatccttggcatcaacattttgcagaccatgctgctgccggccatcgaccgggcaaaggaaactgtggcctataagcttatatccgctgtgccgggggtcggaacggctatgaatacagctgtgggggcggtcattggctccggtgtgcttatccgaaatgtgctggggatgggaagcctgctgattattttgctgatctgtgcggttccggtggttcgggtctgtatggtccttttatcatacaaaattgtacaggcagtgatccagccggttacggaaaaacgccttcttgaaggaatggatgccatgacacagggggtcggaatgctgctgcatgtgcttgtcagctgtgtgcttatgtttattctctccctggcggtggtctgcaacgcggctgcggttgttgcggtataatggaaggagccgatatggaacagcttctggtctgggtaaaaaaactggctgtgtttatgattttgtgcagctatatggaacatctgctgccggcacaatacaagcgatattttcatatgtgtaccggccttatcctgattctgatgatcacatcgccgctgcggcaggtgctccagggcaatattgggagtgaggtaagctgtctgcttgagaatttgaggacgggcagtcaggtctatcagatgaagggggaggatggaaaacgatatcaggcctattatatgaagcaatataaagctgctatgacagaacagatcaggaatctggcagacatgagcggattaagggcagaggagatccggctttcggtcaatgaagatgtgtccagtgattcatacggatgcccgacagaagtgtctatgcatgtgctgtcagaagacggaatggaggcagataacgggagtaaaaagcagttcagacaattgctgagtcagcagcttggaatggcagaaagtcagatccactttggttattcggggtagggaggccgatgagaatggcagatttcaaagcattctggcagcggtttaaaagcggtgaaaacggcggcaaagggcaaaaagaccggtttatgcttctggcacttgtggggctgctgattctggtggctgtatggccggttgggggaaagtcagggaaaacatccggtcagacagaggcatcagtggagaaaaagcaggagacatcgtataattatacagatcagtatgcggctgttatggaaagcaggttgaaatccatgcttgagagtgtggaaggtgccggagaagtgaaggtgatgatcactttaaaaaacaacggcgaacaggtggtggaaaaagacaggacttattcggagaataaaaccgggcagggggaacagagtggtcagacaacaacgaataataatataagccgctctgaatccacggtgtacagcagttcaaacggcgggagcccgtatgtggtcaaacagatagaaccggaaatagaaggtgtgctggtggcagcacaggggggcggtgacgagacagtggtcaatgaaattacttatgctgtgcaggtattatttgatgtaccggtacataaaataaaagtagtaaaaatgagcagcaggtaggagggtattttgaaacggcttttcaggaaaaatcagatcattattacatctctggcaattatgatcgtcattgccggctatctgaattttacagcagaccagacaaaaccggtgaaacaggaagcagcggccgaaacagcagagaagatccgggaggaaaatatacaggctgaggaggcagcagccggtgcggaggcagatattacatcttttccggatgaagatctggcttctgtatcagccgaggcagagagcacagtggatacagagacaccggaaggggaaaaggtcggtgaagcagtacttaccagttctgcctcagcaggcgcattcagtgcttctgccaaattaaacagagagcaggtgcgttcaaaaaatgaggcctctttactggagatcatcaataatacagacatatcggaagacatgaaagccgatgcgatcgccagcatgaacagaatgaccgacagagcagaaaaagagctggatgcggaacttcttcttgaggccaaaggctttaaagacagcgtggtcagcatcaatgatgattctgtggatgttatagtgggtgcggctgagattacggatgaacagaaagcgcagattgaagatatcgtgacacgcaagacagagagaaatgtgtcggatattgtgataacaaccatggaataagtattcatttttatatgaaaagatatacttttcaagaggcggatactttggtataatagacataaccagatgaatatggaggtatagacacaatggcaaatgaacgtgagaataatacgaattatacaatatatgaaaatggtcctttaggagaggttcagatcgccaatgaagtggtggcgatcattgcaggaatagcagcaaccgaagtggatggtgtcgctgccatggctggagatgttcagaaggaattggtcagcaagcttggaatgaaggttttgtccaaaggtgtacgtattgcttttgaagacagtggtatccgggtagatttatccatcattcttgaatatggctgcagtattcctgaagtaacagcagctgttcaggaacgtgtgaagaactcaattgagaccatgaccggactgaaagttgtagatgtgaacatccgggtcgctgatgtgaagatagacaacgaatagcagagggcagatctgccggctttgcaagagccggtatgatttgtccttaagtttgtttttaattaatgatagaatacagtggaggaaagaatgggaagacgcgaattaagagaacatatttttagattattatttcgaagggatttttttcctgaagaagagatgaaagagcaggaagcgttttatattgaatatctggcggatcctgaacagaaagaagtggactatattgtccagaagacagagaagatcatggcaatgattccggaactggataccatggtcaatgaacattccgtcggatggcagacagagcgtatgggcaaggtggatctgacgatcatccgactggctgtctatgagatgaagtacgatgacgatattccggtcagcgtagccattaatgaagctgtagaactggcaaaacgctacggatcagagaattcaccggcatttatcaacggtgtgcttgcgaagatgatttaaggctatgaacagaaagcaggtctattccgtatcaagtgtgaatcagtatatcaagagtctgttcatggatgattttgccctgaatcatatttatgtccggggagaagtttccaattgcaagtaccattcatcagggcatatttattttacattgaaggatcgtggaggagcgattgcctgtgtgatgtttgccgggaacagaaagggactgaatttccgtatgtcggaaggtatggccgtgattgtttacggcagtgtcagtgtgtatgaacgggacggcaaatatcagctgtatgcccgtgagatcatacaggaaggcgcaggcaggctttatgaagcatatgaagcattgaagaaaaagctccttgccgaaggcctgtttgatgaggaacataagcagaaaatcccgaagtatccgaagaggctgggcgttgtgacggcgagaaccggtgcggctgtacaggatattattaacgtttccctgagaaggaatccatggcttcagatcgtgttctgtccggctgctgtacagggagatggagcggctcagtctgttgtccggggaatccatgcgctggaagcagccggtgtggatgtgatgatcgtcgggcgcggcggcggatccattgaggatttatgggcctttaatgaagaaattgtggccagagcggtttatgaatgctcggttccggtgatttctgcagtggggcatgagaccgatacgacgatcattgattttgtgtctgatctgcgtgcaccgacgccatcagcggctgccgaactggctgtgccggatatgcgggtgatccttggtcagatccaggggtatgaggagagtctcagtcatgccatggaacaggcggtgctgcgaaacagacagcgcgtggagaactatcagcgtattttcagacatttgaacccacagtcccgtctgaacgataggcgacagcgtctgatggagatagaagaaagactgcgtattggcatgaaccgaaagctggatgcagccaaggcagaactggcaatccggacgcagaagctggaaggtgtttcgcctctcagacagttggagcgaggctatgcttatgtgtcggatgaagaaggacatggcattacatcagccggacaggtgacaaaagggcagctgctgcttttggatgtcagggatggaagaatagagagcgaagtaacagcggttaagaagcggacgagctgaaagaggaggatacacgatggcgaaagcaaaatcactggagacagcatttgaagagctggatgcgcttgctgcgaagatggaagacagagatctgcctcttgaagaagcttttaagctgtatcaggaaggcgtgaagctcctgcaatactgcaatggtgcgattgacaaggttgagaagaagattatagaaattcatggaaatgaagatgaagaggacgaatagtccggaggctgtgagatgcaattggaacaggaattaaaagagaaaacagcagatatagagaagttacttgagcggatgcttccggaagaagcggggcttcagaaaacgattttttcagcgatgcgatacagcctgatggctggcggcaagcggattcgtccattactgatcgctgagacctacagatttttcggcggtacggatatggcattggcagagccttttatggcagctattgagatgatccacacgtattcgctgatccatgatgatctgccggcactggacaatgatgactacagaagaggacgtctgacttcccataaggtttacggggaagcgatggcgatcctggcaggtgatgcactgctgaattatgccttcgagacagcgtctaaggcgatggatcatgccagagatgatgaagaacttctacgggtcatgaaagcttttagaattctcagttcaaagccggggatcaacggtatgatcggcggacaggtagtggatgttgaactgaccgggaaaccgataccggagaagacactgcgctttattttcgaattaaagaccggtgccttaattgaagcagcgatgatgatcggtgcgcagcttgccggggcatcggatgaacagattgctgcggtggagaaagcagccggcgatatcggcatggccttccagattcaggatgatgtgctggatgtgatcggcaatgaagcattgcttggcaaaccggtgcacagcgatgagaagaacgagaagacaacatgggtgacagtctacggactggaacaggcaaaaaaggatgtggcggaatattcagaggaggcaatggccattctggcgcaaatgacaggagtgacggagcctgagaagtcatttttatatgattttgttgaatatctgatccataggaacaaataacggaagataatagaggtgtgaagaatgtctgggtatttggacagaatcaatgaagccaatgatataaagaaaatagaaccggaagcttatgatgcactggcctcagagatacggtcgtttattatagagtctgtcagtgaacatggcggccatctggcatccaatctcggcgttgtagaattgaccatggcactgcatttgtgtatggatttcccgaatgacaagctgatctgggatgtgggacatcaggcttatacccataagctgctgacaggacgtaaagaggacttcagcggactgcgtactttcggcggcatgagcggttttccgaagcataaagagagcccttgcgacgcttttgatacaggacacagttccacatctatctcagcagcactgggttatgcaagagccagggatctgaaaggtgaggacaggaccgttgtggctgttatcggtgacggttccctgaccggcggtatggcctacgaggcactgaataacgtatcccatctgaagagcaatatgatcattgttttaaatgataataagatgtcgatttcagagaatgtcggcggattgtcgaagcatctgacagccctccggacaagagaatcttatatggacttcaagatggatgtggaaaagaaactgaaacagatcccgcatgtgggtgattctgttgccagaagtgtgaagaaatccaaagattccatcagacagctttttgtgaagggcggtttttttgaggatttcggtattaagtatatcggaccgattgatgggcatgatattaaagagatggtgcgtgtactgaatgcgctgaaacggctgaatgagccggtggtcatgcatgtggtgacacagaaaggccggggctatgtgccggctgagcagaatccttcagcctttcacggcgtgggcagttttgatattgcaacaggtgaatcccttgcaagtaaaagtctgacctatacatctgttttttcaaaaaccatctgcagactgggcaaggctcatccggatgtggtaacgatctgtgcggcgatgccggacggcaccgggctgactgcatttaaaaagcattttccaggtagattttttgatgtgggcattgcagaacagcatgcagtcacttttgcagcaggactggcggccggtggcatgcatccttttgtggcagtgtattcatctttcctgcagcgggcgtatgaccagattatccacgatgtgtgtattcagaacctgccggttgtattctgcgtggatagagccggactggttggtgctgatggtgagactcatcagggcatatttgacctgtcttatttgtcgatgataccgaatatgaccgtctgtgcaccgaagaataaatacgaattgtatgatatgctttattttgcctatcagtatcatgggccgatcgccattcgatatccgaggggcagtgcctatgaaggctttaagaacatgcggccgccgattgaatacggcaagagtgagctgatgtttgagggtgagaagattgcccttgtggcagtgggcagtatggttcagactgctgtgcaggttcgtgagaaactgctggataagggaattaacgcaacggttgtgaatgcccgttttgtctgtccgctggacacagaatgtctggacagactgagcagagatcaccagtggatcgtcaccatggaagagaatgtcttaaagggtggttttggtgaagcctgcggcgattatctgttggcaaagcatgaagatgtcagactgatccatgtgggtgttccggatgtctatgtggaacacggcggagtggaccagttgaagaaaacactgcatatggatgcagattcaattgttgaacgcatctgcagtgcaatgtctgatgcagatgattaatagattaagcacattttgaatgatacagagtcgaaattggagaggaatggatagaccaacatgaaagaaagactggatgtacttctggtaaagcggaatctggctgaatccagagaaaaggccaaggccattattatgtccggcaatgtatttgtcaatggcaacagggaagacaaagccggaacaacgtttgatgaggagaaggcacagatagagattaagggccataccttgccttatgtcagcagaggcggtttgaagcttgagaaagccattgaggttttcggagtagatgtcaaaggcaaggtttgtatggatatcggtgcttccaccggaggatttacggactgcatgctacaaaatggtgcagatcatgtatattctattgatgtgggtcggggacagctggcatggaagcttcgtcaggatccgagggttatctgtatggagaaaacgaatattcgttatgtgacatctgaacagataccggagaagatagactttgcatccgtggatgtttcctttatttcactgaagaaggtgctgggaccggcaagagaactgcttcaggatgatgccagaatggtatgtctgatcaagcctcagtttgaggccggaagagaaaaagtcggcaaaaagggtgtagtcagagacaaggcggttcatctggaagtgattgagatgatccttcagtttgtgacatccattcattttgaaatattgaatttggactattcaccgatcaaggggcctgaaggcaacatagaatacctggtttatatcagaaagcgtccggaggattatcctttgggagcgtggacggtggatcctgcagaagtggttgatcgtgcccatgaggagttagcaaagggataaatcccaatcccataagtgacggaggattcaaatgaagaaatttgctttgctgaccaactattccaaagacaagagacttgtctatacacggatgatcaagacttatattacggaaaatggaggcagctactggataccgagatatatcagtgagcctgataaagatggtgatcagcgctatgatttcagtgacatgccggaggatattgagtgtgtgcttgttctgggcggagacggaacgctgcttcaggcagccagagagctgcttcagcggcatattccgctgcttggcattaatctcggaacactgggattcctgacttcggctgagaagagtgaactgccgaaatgtctggacagtgtgctggatgacagttgttccattgatgagcgcatgatgcttgaaggtgttgcttatcatggctctgagaagatacagatgaatattgccctcaatgatgtgatcattgcccgggccggattctcaagactggtggaattgaagatttatgttaatggtgagcttttgagcatctataatgcagacggcatcatcgtttccacgccgaccggatctacgggctacagcctttcggcaggcggtccgattatttttccgcagacggatgtgatagtgatcacaccgatctgtccgcattcattacaggcaagaagtcttgtcgtgtccggtgaggacaggatcatgattgagatcggcagaagaagaaagacacagaaagaagaagcaatggtaacctttgacggcagaagtgcacaggagctggaaacaggtgaccgtattgagatatacaaggcacaggagacaacgcagctgatcagattaaagggaagaagcttttatcaggttcttcagaacaaaatcggcacggcataaagggtgggtattataatgaaattaaaaagacatgagaagattattgagctggtgaataaatatgagattgaaacacaggaagaactggcctctttgctgaatcaggccggttttcgcgtgactcaggctacaatttcaagagatatccgtgaattgcgtttatcaaaggtcaacagccatgacggcaagcagaaatatgcgattatgtctgtcaaagagcgtggattgaacgacaaactgagcaaagtcctgaaagaaggctatatttccagtatggaggcttccgacctggtggttgtaaaaacagctaccggtatggccatggctgtagcaacggcactggatgctatggagcttccgggctttgcgggatgtattgccggtgatgataccgtgatgtgtgcccttcattccggtgcggatgttgagatgttgttaaataggatcaataaagtagtcaatcaataaaaggcagaggtaggaaatgcttcagaatatacatgtaaaaaacatggcgctcattgatgaggcggatgttgatttcggaggtcatctgaatattcttacaggtgagactggcgccggtaagtcaatcattatcggttccatcagtacagccctcggcggtaaggtctccagagatgtgatcaggaaagacgcggaatatgcccttgtagaattgaattttaaagtgaacagtccgcagatccttgcagagctcgagaaaatggaaataccggtggatggggatgaggtggtcatctccaggaggattaccggcagccggagtgtggcaagaattaatggagaactggtatcactgcctgttctcaggcaggcggcggcacttttgattgatattcacgggcagcatgaacatcagtctcttttacataaggataagcacctggctattttggatcaattttccagggaagaaatggcatccgtcaaagatgcattaaaagacagttacagggaatatatgatattgaagaaagagatggatggggcgattaccgatgagggaaaacgtctcagtgagatttcttttttgcagtatcagatagaagaaatagaaaatgcgaatctgcaggatggtgaagaagagcagctggataaggcttttcgcaagatgagccatgctcggcagatgatggagagtgtggcggcggcccacggcatgaccggttatgaaggctcttcctcagcgggagacctggtgggaagagcactgagagaactgtcttccgttgagaaatacgatgaggccattggcggtctgatcagcatgctgacagatatcgacggccttttgaacgactttaacagggaactggcagattatgaatccggtctcacttttgatgaatctgtttatcatgagacagaggaccggttgaatctgatccagcgtctgaagaccaaatacggcagcagcattgctgagattcttgctcaccaggcagagtgtcaggaagaactggagaagttggatgattatgagaactatctgtccggccttcggatgaagctgaatcaggcagagaaagaacttaaagatttgtctgacaagctgacgactattcgaagagccaatgcagctgtgcttcaggaaagaattaaagcagcactgatcgatctgaattttctggatgtccggtttgagattcattgtgaacccctgggccattatacagagaatggtcaggacagcatagaatttatgatttccacgaatccgggagaaacagtgaaacctctgggtaaagtagccagcggcggtgaattatcgcgaattatgctggcggtcaaatctgttctggccgatgcggatgccattgagacattgattttcgatgagattgataccggcatcagcggacgtacggcacagaaggtttctgagaagatggccgttattgccagaaagcaccaggtgatctgcattacccatctgccgcagattgcggctatggcggatgatcattatgttattgaaaaatctgccatggagcagcgtaccatcacagagatttatcatttatctgatgatgcttctgttggtgaaattgcacgtttgctgggcggtgtggaaattacggatgctgttatgcagaatgcccgggaaatgaaaaatctggcgcagtcgaaaaaatagattaaattgaaattgttcatcacatactaacagggaacagtcgagagattatgtccctgtttttatttacgcgagcaacgagccaaagtccgtgattgcacgagaccttggcgttgctaagcgccagtggcgcttgtttagcaacgaccgaaacggagtgtagaggtcgcgataacttgagaaactcgcggagcgtgtttctcatagtttttatagaaaggtgtgtgatggtgtggaacgaatgagaaagtatcgtgtatggctgacggcagcattggtgattaatctggttgttttgtttgggtttgtgatgaattgttatcagacgagaaaaaatgaagtggatcagaagctgacgaaggtgtcggcggatgtagccaggctgcagtatgtgatgccggtgggaatgccggtggggctttatattcacacgaagggtgtgatggttctgggaacgggaaaggtgacaaacctggaggatgatgtgctggagccggcaaagacggtgtttcgggagggggattatatattaagtataaacggcacgacccttcgaaataccagtcaggcgatgagtctgatccaatcctgtaaagggaaaatgctcagttttgaggtacttcgggatggaaaaaagatcatgctgaccatgaaaccggtggaaacagcggaagataggtataagattggcgtatggcttcgggatgacacgcagggaattggtacgatcacatatattgatgcggatcagaattttgcagcattgggacatggcatcacggatgtggataccggaattctcatggatatcagtcatggcatggtctatcaatctaatattttgtcgattgtcaagggttcccagggaacacctggagaaattgtcggcactatcgactatcagaaaaagaatcgcattggaacgataaacgataacagcagctgcggtattttcggcacggtggatcgggattatctggcttatgatccggagaaagccgtacctgtggctaatccggaggaagtgacagaaggtccggtacaaattgtctgcacaatgaacggtgagacaaatcgttatgcggccgaaattcggaagattgacaaaaacaacaaagatcacaaaaattttgtcctgcagattacagatgaacagctgctggaaaaaacaaacggtattctgcaggggatgagcggcagccctgtgattcagaatggaaagctggtaggggctgtcacccatgtctttgtcaatgagcctactaaaggatatggcatttttgccgaaaatatgcagaatgctgaagaataaaaggaatcttctgctaactggcaaaggtatccataatatggtagaataattttgtagctgatgattcaggcctgaagatgttgttggtcatcaggccttgaaagtctgtgaaggaggaactgcctatggctcaaaacctgattttagttgcaattgttttatttttatgtttgatggccgagaagctgtcaggaaaagtcggcatgccggcgttgattctgtttatgggtgtggggatgctgtttggcagtgacggtattcttcggattgcttttgatgattatggactggcacagaatatctgccttattgccctctgttttatcatgttttacggcggtttcaatatgaaatggagcgcagcaagaccagtggccgtcaaagccatctgtctttctactattggtgttgttgtgacagccggcctgacagcggtattctgcttggtggttttgaagtttgatttcgtcgatgccttcctgatgggggctgtgttatcatcaacggatgcagccagcgtcttctcggtattgcgaacgaaaaaactgaatttaaaggatggtacggcgtctattcttgagatggagagcggcagtaacgacccggtggcttatcttttgacaatgatcggtatcatgatgaaaacaggcggaagtctcagctccctgccctatatgatttttgctcaggtggtgttcggtttggctatcggcgcagcggctgcttcccttggcattcttttactgaaaaagggaacgatgcaggcagcaggcatggatatgattcttgtgatcgccctggtgatgattgccttcggtttatctgaggccatcggcggcaatgcatttctgacggtttatcttatgggtatattgctgggaaacagcaatatcagaggcaaagaaacgctgatcccgttttttgacggaatgaccggtctggctcagattgttctgttcttcttgctggggcttttgtccttcccgcacaagctgccgcagattttctttgtatccctggcgattgccatcgtactgacggtgatcatccgtccggctacggtatttctgattatgaagccttttaaatgcagcagcaggcagtgcctgatgatctcctgggcagggcttcgaggtgcggcttccatcgtgtttgccattatggtgatcgcagcaagttcgtcatcatcagatacattgtttcatacagtatttatggtggctcttttatccgttgccatacagggaactttgctgccatttgtagcagagaagctgaagatggtggatgacagttgcgatgtccgtatgacttttaatgattataaggaagcatcagaaattaccatgatgcagatggaaatcccggagggacataactgggagaatcgtctggtgaaagatgtcagcatgcctacaggttcattggctgtgatgatcaaacgtcatggagaaacattgattcccggtggtgatacaaggatactggcaggcgataccattgttctcagtgttccggcctatgagtccggcggtcaggaacatcttgaggagcaggagattacccaaaagcatcgctggtgcaataaaaccattgcggagctgatgcttcctcacggaacgctgatcgtactggtgcgccgggataatgaaaatatcatcccaaatgggcagacagagattctggaaggggatcatgtggtgatctaccgataagtggggtacatggattattgaatcttgaaaggaaatagaatagatgataaagaatattgtttttgatatggggaatgttcttgtggcttatgatggccgcaaggtatgcaaacattacataaaggataaaaaggacaggaaacgcgtatttacggcaatttttcagtcaccggaatgggtttatctggacatgggcatgattccggaagaacaggctgttgaccagatgtgtgcccgtctgccgaagcggcttcatgaagcggcaagactgtgtatgcgggattggcatctctataatatgaagcccatcaaggcaatgattccagtcatccaggacctgaaagcgtgtggtttcaaactgtatatctgctccaatgcctccctgcgtctgccgatgtgctatcaggaactgctgccggaagttgacagcttcgacggcatccttttctcagcagaagaaaaactgttaaagccgcagaaagaaatctatgaacgcctcttcgaaaaattcgacatcaaaccggaagagtgctacttcattgatgaccttcagctcaacatcgacggcgccgcagcctgcggcatgaaaggctactgctttgcagacggaaacgtagaaaaactgcagaaagccctagaaagcctcaataaagacagttaatagatcgaatgccgttaagattcgggctcatattctgtgctgatggcaagattgattttgaaaaaaaattaacgggacggcgcattggtatcttcaaatggcgtgtcagcagaaaataaaatatggaattcaaaaagagacattcaatcccaggtgcttcagcattggccggtacttagatgctgttctttagcatcttatgtaccgctgccaaatgctggcagtgtgaacgtgcctgtgatgaatgtctcttttgaattccatttgatatacagggatgacacgccaatgaatatttagagcgccgtcccctttgttttattcaaacacaatcttgctgtattttttcttgccgcgtcgtacgacaaagtcttctttcatgatgtcttccggtgtgtaagctgctttaaaatcagtaactttttcaccattgacggtaacaccgccctgctgaacattacgtcttgcttcggaacgtgtcgggcagaggcctgtagctacaaggataccgaggatatcgacgctgccgtctcttaaatcagcttctgtcagtgttgtggttggcatatcagcagcgcttcctgctgagaacagtgcacgggcactttcctgagcctttgtggcttcttcttcaccgtgaacaagcttagtcagttcaaaagcgaggatttccttagcctgatttaactggctgccttcccatttatccatctcgtcaatctgttcaagcggcaggaaagtcagcatacgcaggcatttcagaacatctgcatcgccgacatttctccagtattgatagaagtcgaatggagatgtcttattagggtcaagccatacagcaccggactgagtcttgcccatctttttgccttctgaattcagaagcagtgtaattgtcatagcagatgcattcttgccgagcttacggcgaatcagttctgtaccgcccagcatgttggaccactgatcgtcaccgccgaactgcagattacagccgtatctctggaataactcatagaaatcgtagctctgcatgatcatgtagttgaattccaggaagcttaatccgcgttccatacgctgcttgtaacattcagctgtcagcatacggttgacagagaagtgggcaccgacgtcacgaagcagctcgatgtagtttaagttcatcagccagtcagcgttgttgaccatcagtgctttgccgtctgaaaagtcaatgaaacgggacatctgtttcttgaaacagtcaacattgtgctggatggtttcaggtgtcatcatctgacgcatatctgtacggccggatgggtcaccgatcatagctgtaccgccgccgattaaggcgattggacggttgcctgccatctgcagacgtttcatcaggcaaagtgccatgaaatggccgacatgaagactgtcagcggtcgggtcaaaaccgatgtagaaagttgcctttccgttgttgatcagttccttgatttcttcttcatctgtaacctgggcgatcaggcctctggctaccagttcatcatataaagtcatgagaagttctcctttcaaaattgaataaaaaaaaccccgtcctgtataaggacgaggaataactcgcggtaccaccttaattgaacagctattcgcataactgcactcatcaagtatctgtcaatacttgtgcatactaacggttgcattccgtcgcagcctacttggaatcgttcggtgcgcagcttgtgaaggtattcagcgatagcttcccctctgccttccaccaaccggcagctctctggatgttccactatggcttacttatttcagtcattgcctttaaaatatctgtttaacattataaagcataaaaagtttttgtcaatactattttggaggagattttatattgaacagttacgataagttataataaaaaagtgaatcggactatttggccaggttcaatcccagatatagcattaccgcatccttgaatgctcttggattcagcccggatttcctgaaaatatgattcagtttatattgcagtgtatttttgtgtataaaaagctgtcggcttgtcccggacagggacatatcattttcaaagtaagcagtgagaagatgacgttcgttttcatccagagtggataaagtcttggtgagaaattcggctttttccagtggattcagcccggagagaataagctcaaggccaagatcatcaaagaaaatatacccctccgtctgagctgtaaaatgtttcatagcggtgacagctgtctgataggaatcacacaattgatagacagaggtcatttttccgaccgtcattttcagggatgtctgatgatcctttgcaaagcgttccagaatatacgcgttgtgttccaattgtgacggcaaaaccacagcagtatattcattcggataataaaaggtatatagtcttatagaaagcatttcaaaaaactgatggattttctgttccagcagagaaagattgtcggaaggactttcagcagctgcacgaatcagcaggatccggtatttttgtgtaatattgatgccgcattctttcagacatgcattaagataatccatgttggcagaagcctggtggatcagtgcgtccatagcgaaatgacgcttgtctgcctgattgcggctgatggtgttcagttcccgttcacggatcagcagatgcgtgatgcgctccgccagatgggcatatttgcgaacttcatccggctgtccggtaatgccgattacggccatgaaggtctgattgtagtaaacaggcagattgatgcccatgcgtgtgccgtgaaaattgtcatcggcccggacctcaatcgtttcgcctgtaagggctgcctgatggccgatttcatgaaaggtgccgactctttccgggtccgtactggcaaagataatgccatactggttgataaaatttacatcccgtccgcagacgtctttcacggtattgacgacctgggcggcaagggttctgtcgattttaaacatagggtacctccgattaataatgctacaagtataccatagctatttcttgcactttcattgataataacgattttcatattatgaacctgtcattgcgatggattagttagagctattttatcataaagtggtataaataacaatttatacaagatgtatacaagaaaattgttctatgtaacatatatgcagagcgaaaaaaaggatatactttcagtaagaaaataaaaacggcagagtgcatctcagttagcggatgcagtcaatggacagaaaaatgtatggaggtatcaacaaatgagagcagtgatcgcaatcgattctttaaaaggcagtttaagttctattgaggcagggcaggccattgcggagggtatcagaaaagcggatgccaaggcagatgtggtcatacggccgttggcagatggcggagagggtaccgtggaggctcttgtatgcggcatgaatgggacattacagcatgtgaaggtgacaggcccattgggtgagccggttgtctgtgagtacggcattattgctgagacaaaggccgcagtgattgagatgtcaggtgcagcaggtattacacttgtaccggatgcaaagaagaatccgctttatacaacgacttatggtgtgggtgaagtcattcgtgatgccattgaaaaaggatgccgcagatttattgttggtatcggcggcagtgccacaaatgacggcggtattggtatgctgcaggcattgggctacggtttccttaacaaggacggtcagcaggtgccttttggtgccatcggtctcaaggaattagagacaattacagatacttacgtcctgccggagctggcggaatgtgaattcaaaatagcctgtgatgtgacgaatcccctttgcggtgagaatggctgcagtgctgtttacggcccgcagaaaggtgccaatccatccatgattatggagatggataaatggcttcgctattatgcagctcttgcaagggaaaaatttccgaaagccaatccgaatgaaccggggacaggcgcagcaggcggccttggatttgcatttctgacatttaccaacgcagttcttgagtctgggatcaaaatcgttctggaagaaacaaaactggaatcctatgtcaaaggagcggatgttgttgtaacgggtgaaggcagactggatttccagacagccatgggcaaagcacctgtgggggttgccgggttggccaaaaaatttgacattcctgtactggcctttgccggcagtgtgacaaaagatgccacagaatgcaacaaaaacggcatcgatgccttcttcccgattcttcgcggtatctcaacactggaagaagccatgaaacctgaaaatgccaaacaaaacttgacagacacagcagagcaggcatttcgtcttttcaatatttgccgccaggcctaaacttcgatgcaaaacgttcagggattttgaataggagcagcaggccgtccttcaatgcaagtgtgcttgcactgaaggacggtctgctgctcctgttatcaaagattatagatgttttgcagttgaaatatttaaacctggacggtaaaataatttttagtgattataaaatgaatgatgtgatagatacgcagaggttttatggaggttatgatggagaaaacggttttggttgtgatccctgcagaggagagacataaagagaagttggagcgtgccggtaaaggctgccggtttgtgtatgcgtcaccccagacagcaacagaagaaatgattgaagcagcagatgtgatcatcggcaatgtgaagccggacagactgcatgcaccggaacgtctgcagtggctgcagttgaattctgccggcgcagatgcttatgtgaaaccggggattttaagaagtactacaatgttgacaagtgccacaggtgcttacggtaaagctgtggcagagcatagttttgccatgcttttgatgctgcagaagaagctgaatttatacagagacgcccagacaaagaacgaatggagcgattttggtacagtcacatccattacagatgtcacagtgcttgttgtgggactgggggatatcggcctgcattttgccagattggccagtgctcttggcgctcgtgtcattggtctgaaacgctccatgggaccatgtccggaaggtgttcatgaattacataccatggacgagctggataacttattgccgaaagtggatgttgtagcttcctttgtaccgtcaacagcgactacatatcatatgtacacaaaagaacgattgatgaccatgaaggatacagcaatcttcttaaacagcggaaggggagacgcagtggcttcagaagtcctttatgaagcactttctaaaggctggattgcctcagcgggaattgatgtcacagaaccggaaccgctgccggcagacagcccattgtggcagctgccgaacctgatgatgacaccgcatatatccgggcagttccatcttccggagacatttgaacgcattgtggatattgcggctgcaaatttggaagcttatcttaaaggtgaaaacctcagaaatcgaatttaataatattaaatagcggcgcctgatatttttgggcgcctttttcatatttggtgagcaccgttttgtttgaagagatctgtgaagcaggaagcccattggctttagacaatgggtagttcacgttatcacacatacacatattaagcgagaggaggttgatgatatgggaaatgtgaatatgtgtaaggcaatacaggaaatgatacaagacggcagagatgagggaagagtccaacttttggtaacgcttattcaaagcggagatatcagtctgcaaagagctgccgcacttatgaatatgactccggaggaatttcaggagaaaagtaagatgatttcctaatagtatcagcagatgataactattggggagttacaaatatttaataaaacatcaaagagactgaaaagatttggaaaatgctttcactttataaggcttcacagataggatatgtaaaatataatcctgcctgtgaagcctttatatatttactgaaaatacaatgtgatggattaatcgcgcactttaatgtgtgcttctctcagctgagtctcagtgacaatacccggtgcgccgcacatcagatcctgtgcgttgccgttcattgggaaggcgatcacttcgcgaatgttgtcttcatttctcagcagcatgatcattcggtcgataccaggggccataccggcgtgtggtggggcaccaaactggaaagcgttgtagagtgcaccgaatttcgtcttcaggtcttcttcgctgtagcctgcgatttcaaaggctttgaccatgatatccagatcgtggttgcggacagcaccggaggaaagctccacgccgttgcagacgatatcatactgataagccaggatatcttcagggttcatggtgttcagtgcttcaaggccgccctgaggcatagagaatgggttgtgtgtgaaatccatcttcttctcgtccttgttgtattcatacatcgggaagtcgttgacaaaacagaagcggaaggcattcttctcaatcaggtcaagacgttcacccagttcgtttcggagctgtccggcaaaaaggttagcacgttcttctttatccgcaataaagaaaatcgtatcgcctacttcaagacctgtgagttcagcaaattcctgcttcatgtcatcagggataaatttgtcaatggggcctttataactcttatcttccatgacttccaggtaaccaaggccgcccataccgatggaagtggcgaatttcagcagtttctcatgaaaacccttggacatatcggcatgaaccctgatggcacggacggtacgtttcaggaaaggtttgaatgtacatctctgaaagaattctgtgacatccatgatacgcagcgggtttctgagatccggcttgtcagagccgaattgcagcatggcatccttgtagctgatcacaggataaggggcagctgtgacagaagcaccttccggtgcaaatttttcaaaagtggctgtcagaacttcttcacctacacggaaaacttcttcctgagtagcgaagctcatctcaaagtccagctgatagaattcgcccggtgaacggtctgcacgggcatcctcatcacggaaacatggtgcgatctggaagtatttatcaaaaccggaaaccatcagcagctgtttgtactgctgcggagcctgaggcaatgcataaaaacgacctttgaactttctggatggtacgatataatctctggcaccttcaggagaagaagcgcagagaatcggtgtctggatttcaagaaatcccatctctgtcatcttctgacgaaggaagctgatgacctgtgaacggaaaatgatgttgtctttgactttctggtttcttaagtcaagataacgatacttcagacggacatcttcacggatttccttggaagtcataatctcaaaaggcagctggtgataaaccttgcccagcatatcgatgctgtgagcttcaagttcgatagtgcctgtaggaatcttcggattgtaagtctcctcatcgcggtggtcaatgacaccttcgatggagatgcagttttctttggtaataccgtccaagagagaagtgtctcttaaaacaacctggaggacaccgtacatatctctcaaatcaataaaagatacaccgccgtggtcacggatattttcaacccagcctgcgacacggatggtcttgccaacgtcgctttcgctgatctcgtttaaaattctgctgcggtaaatgtttggtgttgtcataattggtcccctttcattttgtgatattcaatcatatctgctgagatgtccaggacgaaacgtataacaagtgccttggcacattcctgcgcctgcagcctattccctgaaaataaaaaatcgccctgaacgatgatcgttcaggacgaatataaaatccgcggtaccacctgaattactgcaatgcagtctctcaacagaggcaaaaacctcctgctgtctgacgtccagctgacggcgcacctactgggcaaaatgctgttcagattgcggctgttaaagtgttattcacgctgattcattctgtgggttctcactctctccactcactggaagcgataaacagcgctacttctcttcgtcatcgcctttaacttttcgttagcagtattatagcccttgataatttattttgtcaacgtaaaaaagtataaaaattttaggaaattaaagtggtgatatagtgaaaaattacctatacaactagaataatttacagatatttccagaaaataaaaaaggccattcgcaattgtgcgaacagcctttgaaaaatgttcaatgcaaactatcaatcaaatcaatgatagcatacacatttagtccaaatgatgctgccagtcggctttgaacaggaagatcagaaacaggatggtactgcatccccatgtcagcggataggcccaggaaatcatctgaaagaccgggaagaaccggagtgctgtggtgacgtagacgatacgcaggccgcaccagaaaagcagcattccagccattggcacaacagcatagccgcagcctctcatcacaccggcagagcaatgggaaaaggccagcaggaagaaaaacaggctgacaatgtgagcgtgaatagtgccgtaggcaacggcttcctgtgtactgccgaaaatcttcagtgcatatggaataaaaaagtagatcagaagtccggtaacctcagcggtgatcatgccaaataagatgccgaaaacggcgccctttttggcacgatggtattgcctggctcccaggttctgactgacaaaggtcggaagtgccatggccatactcataatcggaaggaaaacgaatccctcaatcttggagtaggcccccattccggacatagcgtaagcgccgaaggaattgatattcttctgaatcaccaggttgccgacggtgatcacggcattctgaatgccggcgggcagaccctgatacaacaccttcttcatcatgtgggaatggtaatgcagctttttgaaatcaagccgggtataatctttaatccgacacatacgaaacaaacagagaatgacgctgagaccctgagagatcacagtggcggctgcagcaccggtaacaccccagtgaaaggcaggatgggctacaaaaagcagatccagaccgatattcacaatggaagagaataacagatagtaaaggggatgaatactgtcacccagggcacgcatgatggacatgcagatgttgtagaggataacagtggatacaccgccgaaataaatctgcagataccttaaggcatggggcataacagagtccggggtgccaagccataccagaagatggggagccaggataagaccggcaacagtgccgattgcggaagcaatcagccccatcaggaaattcgtgtggacagcctttgaaacattgtcttcatcgcgggcgccaaaatagcgtgaaataacgacaccgccgccggtggcaatgccggagaaaaaaccgatgatcagaaagacgacagtgccggtggaactgacggcggcaaaagcatcgttatccgcaaagttgccgataacccatgcatcaaccatgttatacaactgctgaagcagctgaccgagaaacagcggaatggcaaaggccagaataccgccaggaatcgatcctcttgtcaggtcgatgctgcctttattttctttttgcataaaaaaacctctttaattcaatggatttgaaataattaacattaataaaagtgtatcatgtttgaaaataaacagcaataagcccttttgatttttagaaaaaataaaaaattgaataaaaacagacaaaataatatgtttttcgacttcataaataaaaataataaaaaaattagaaaatattgtcctattttggtggttattgcgagttttattaattgagacaatctttttttgataatataatacatttgacgcttgttggaaaaagatgaagaatgggaggctgcgttatgacaaaaatcaatgttgcgattgttgatgacaatgagaagatggtcagtttgttggatgccatattacagacggataaaaatattgaagtcatcggaagaggggacgatggtgttcaggcattggacattattaagaatcaggaaccggatgttgtccttttggatttgattatgccgaagcttgacgggctggaggtcatgcagcaggtcaataaggatatgtcgctgaagaaacgacccgcatttattgtgatttctgccattggaaaggaaaacatcacggagaatgcttttaatctcggcgccatgtattatattatgaagccatttgaaaatgatatgattctgcgtcgtattcatcaggtgactgaacgacagattttacagccggtccatacacagaagagcagacaaacagattatacgacagaataccgggaaaagaatctggaaacagatgtgaccaacattattcatgagattggtgtgccggcgcatatcaaaggttatcagtatctgcgggatgccattattatgtcagtggataaccgggaggtcattaattcgattacgaaggtcctgtatccgaccattgccaagatgaataagacgacgccgagccgtgtggaacgcgcgatccgccatgctatcgaagtggcctggagcagaggcaagatggataccattgatgagctttttggctataccatacataccggaaaaggcaaaccaactaacagtgaatttattgcgttgatcgcggataaaatccgactggaatacaagaacaggagttgataattgactgaaaattcacaaaatttctgcttttattgcaacgaattgtgttgtataataatagaagatacaatataatgcaatagcaggaggaacaaagccttatgaagaaagtcctatttgcggcatctgaagcggtaccatttattaagacaggcggattggcagacgttgtcggatctttgccgaaggcatacaatagagatgaatttgatgtcagggttgtattgccgaaatacagagtgattccggaacattttcaacagcagatggaatatatgacgaatttttatatcaatatgtcaggacggatgatttatgtcggtgtatttcagatgatgctggatggcgtgacattttattttatcgacaatgaatactatttttccggagacaggatttatgaagacggattgtgggatcttgagaagtttgcttacttcagtaaggccgcactgacgatgctttgtgtcatcgatttcagaccggacatcatccattgccatgactggcagacgggtcttatgccggtttatctgaagaatgaattctgggatagttcttcttacagcgatttttaccagaacatgaaagccgtgatgacaatccacaatctgaagttccagggaacatggaacattgatgatatgatgcgtgtaacaggacttccgggctatctgtttacatcagacaaactggaagcatacggcgccggcaattatctgaagggcggccttgtttacgcagactggatcaccactgtcagcggtgtttatgcgaatgagatcaagtatccgttctatggagagggactggatggattgatgcgtgcgagatccaataatctttcgggtattgtcaatggtattgattatgatgagtataacccggagacggatccgatgcttgtacacaattattctccgtataatttcagaacagagaaggtgcataataagacggcgctgcagcaggagcttggcatgcaggtagacggtggcaagtttatgatcggtcttgtttcaagattgacagatcagaagggaatggatctgatcgattgtgtgatggaacagatttgtgcggaagatgtacagtttgttattctcggtacaggtgatccgcgctatgagaatatgttcagatactatgaatggaagtataaagacagagtttcggcaagtatctgttatgacaatacccgttcccacagaatctatggtgcatgcgatgcatttctgatgccgtcactgtttgaaccatgcggactcagtcagctgatgagtcttcgctatggtacattgccgattgtaagggagacaggcggtctgaaggaaactgtagaaccgtataatgaatatacaggaagtggtacaggattcagttttgcaaattataatgcacatgagatgctgcatgtgattgagtatgccaagtctgtttatcatggtgacagagaagcatggaaccgtattgtagacagggcaatggcagcagatttctcctggggcaattcagcgagaaagtacgaagatctgtatcgttctttataggaatacagaagttcaactgagaatttaaaagtgattgggaaaaggaaaaacgtaacctttctttgggggtgtgtgccaatagcgcattcgtttggcactaagaacagagaggttgcgtttttcttttgtttacagatgcggttattcgattctagtacatcgtttcgtaaataactataccattcacttgcctgcgaatccgagtgtgcaggcaagtgaatggtatagttatttcgaaaacaatgtattagtgacgaatcatgagggtatggataagatagtcatagacatcgccatggagattgcgccaattatcgcagatggcggttgcctgagcttcatctgtgacgtttaatgtgatgccgacgagaagttctttcttatcatggatttcgcagcgaacaatatagcagtccttcttatcttcataataatcagcggtaacttcattctcacttctcaggtgatacttgtgctcattgaaaaactggtcgatttcagtcttgatctcagctggaatcttgtgaccgaaaaattccagcgtttcttcaccggactggttcatggaatagtaggaattgttgtggatatgttctgttcggatcaattctgtatcggaaaggtcgtggagcgcctgctgaagagtaaaataattcgtatagcccttgtccagaataaattctgaaatctgagaattcgtcaatggaaaatcgaccttattcagcatatagagaaccattaatttataaagcatcagtgtatcctgattcataaaacaaaaactcctttctattgcaatcatcaattcctgtcataataatcattcgtcaacggaacataacagcgcccctgccatgcattgcgaagcttcatgcaatgatgaatatgattaagtacctgtttcttgttgcggctccagtctggggcagccagcagatgtttgggaccgtcaccggtaatccggtggataatcacatccggcggcatatgctcaatacagcggatgaggatatccgtgtattcttccagtgtcagaacatggaacggctgctgcagataatcagtataaagatcggttcctttgagaacatggagcagctggaacttgacaccctgtatgggctgatgagcgatataatcggcggtagccagcatgtcatcagcagtttcaccgggaagcccgagaatcacatgggtgataacttcgatgcctctttcgtgaagattcaaaacagctgcatcatagacagacaatggatagcctcgccggatgtaagcagctgtctgaggatggattgactgaaggccgagctcaacccacaccggtttgatctgattcagttctgataaaagatcaagaacctccggttgaagacagtccgggcgggtggcaatggaaagaatggctacttccgggtggcggatggcttctgtgtaaagtgcccgcagacgatctatgggggcataagttcccgtaaatgcctgaaaataggcgatataacaaggcatcggggattccttgctgccaatctcaggctgaccggaaagccgtttccctgcaagcagctgtttgccttcctcaatctgttccgtgatggattggttcctggatgcggcaaaatcaccggaaccgcccgcactgcagaagatacagcctcttgcatcgatcagtccgtccctgttggggcaggtaaagccgccgtcaagggcaatcttataaatcttgtgcccgtaccgggccttcatctcgtaatcgagagagtggtaacgcttatctgcccacaaaactgcattcctcctaactacatatatgatagcatagccggcaaatttatgcaaacagatgtgtggtttgatttgtactcgatttttatagcgttttctggtatagtatatcatagagtattttttgtgtgtaatttgtaagattactattgcgttaaaataggcattgaatcaaaccgggggagattttatattacagggatcaggcaggcgcctattgaggatccgaaggctttataatggcggattgtgtttaatgtgtataaagtaaagtaaaattcggtcaaaaaaacgacaaaaacaggatgctcaataagtttattctgaataacttattgagcatcctgtttattgatttctaagaccgaattttactttattatacaataccatgagcaagcatagcatcagcgactttcttgaagcctgcgatgttagcacctgcaacgtagttgttctctacaccgtattctttagcagcgttgtcgatgttgtggaagatgttgaccatgatgtctttgagtttagcgtcaacttcctcgaatgtccagctgtaacgcatgctgttctggcacatttcaagagcggatgttgcaactccgccggcattggaagccttgccaggtacgaagtagatatgttcctgaagatattctgttgcatcaagagtagtaggcatgttggcaccttcagcaacaaccttgcagccgtttgctacaagctgtttagcatcttcaaggaagagctcgttctgagttgcacaaggaagagcgatgtcaacaggaatctgccatacgccgcggccttcgtggtattcagactgtggtctgtatttcttgtattctgtcagacgtgcacgctgtacttctttgatctctttcagagcagcgacatcgatgccttccggatcatatacccagcctgtggagtcagagcatgtaacaactttagcacccagctgctgagccttctgaatagcgtaaatagcaacattaccggcacctgatacagcaacagttttgccttcgattgtgtcgcctttgcattttaataattcttctacaaggtagacaagaccgtaacctgtagcttctgtacgagcgagggaaccgccgtatgtgaggcctttacctgttaagacaccttcggatacgttgcggattctcttgtactgaccatacatataaccgatttcacggccgcctacaccgatatcaccggcaggaacatcagtatcagctccgatatgcttgcaaagctctgtcataaagctctggcagaaagccataacttcacggtcagatttgcctttaggatcgaaatcagaaccgcctttgccgccgccgataggaaggcctgtcagggagttcttgaaaatctgttcaaaaccaaggaatttgataatgcttaagttaacggatggatggaaacggagaccgcccttgtaaggtccgatggcactgttgaactgtacacggaaacctctgttgacctgaactttgccttcatcgtcaacccatggtacacggaacataataatacgttctggttcaacgattctctcaagtaatgcttcgttctgatactttggatcgttatctacaacgagtcgaagagaattcataacttctgtcactgcctggataaactcaggttcgttaggattttttgctttaactttttcgataatttcgtcactgtaagacattctgtttcatcctccttatattgacctgccgacggacaaaatccgcagcaaagtatgttcagtggaattcattctttccattgatgattataatatagattaagcaataattcaatcttttttcactttaatctgtaaaaaaataggaattttgttaaaagtttccttcataaaagctgctgtcaattattaaagcggatataaagctgaaaaatatgcaggaaatgattgcgaaactttcaaattgtaaaaaattgtaaatgaattgacggttggttttagtataaaattataaaaagaaaataaaaaaacaaaagttatgctttttatttgcgtttatttcatatataatggtaaagaagaattattcaaattttctaaaatataagacaccgacaggtgttttgttcttattttattaggattggaatttattttattaggattacagagatttcgtaaggattcattacccagtataagatataattttaatatgattcagaatcgtttgacagcgagtgttattttaatgtgtcggaaacggtgaaaatttgtcagcagataaggaggtttttatggctgaacaggaaaagaaaatgtctgtcgcacagatgagagaaatattgaaggcccaaggcgtcagaaatacatccgtgatgcgtaaggcggaattgcagaagctcatggctgaaatggggcttctggaagatcaatcagatgttttggataaagacaaagagcagccgactgcatcagttgagaaagggtcggaacatgaggtgaagagcgagaataaaaagccttatgtttttcggggcagaacatccagggcggaatacgctgagcggacagaacgcccggagcggacaggacgcacagaaagaacggagcgttcggagcggacagaacgcacagaaagagcagagcgcctggagcggtcagaacgctcggaaagaacagagcgcccggagcggtcagaacgcacagaaaggacacaacgctcggaacgacagacatatacaaatggcggattgtacagtggcagaagaaacacctacggtcagcgcagcgagaactaccagcggaatgagaacggtcagcgcagcgagaactaccagcggaatgagaacagtcagtgtaacgaaaacggccagcgcggtgagaattatcagcgtaatgacagctatcagcggggggatagttgccagcgggtggatgtttaccagaaaaatgagtatatccagtcaaatgaggaaagtgaaatcccaggttatggtcagttagacagcggcatgatggcgaatggcattttggaagtaatcccggaagggtttggatttatccgctgtgagaattatatgcccggtaataatgatgtgtacgtgtcaccggcgcagattcgcagatttaacctgagaaccggtgatattatctgtggcaatatcaaggtaaagacagagaaagagaagttttcagcacttttatatataagaacagtcaacggcatgccgccgtatgaagcccagagacgcggcaagtttgaaaatatgacacctgtttttccagacagcaggattaatcttgagacaccgaatgcgccggtttccatgcggattatgaatcttgtttctccgattgggcggggacagcgaggtatgatcgtatcaccgccgaagaccggcaagacaacacttttaaagcaggtggccaaggcaatccataccaattatccggacatgcagatgatcattcttctgatcgatgaacgtccggaggaagtgacggatatcaaggagtatattgagggcaataatgtggaagtcatctactctacatttgatgagacaccggaacatcataaacgtgtttcagagatggtattggagcgtgcaaaacgtctggttgaacataagaaagatgtggtgatccttttggacagcattacacgtctggccagggcgtacaacctgacagtgccgccgagcggacgtacactttcaggcggtttggacccggcagcacttcatatgccgaagaaattctttggtgctgcgcgaaatatgcgtgagggaggcagcctcacggtgcttgctacagctcttgtagagacaggcagcaagatggatgatgtcgtttttgaagaattcaagggaacaggcaatatggaacttgttctggacagaaaactttccgagaagcgtatcttcccggctatcaacataccgcgttcaggaacaagacgagaagaattgctgctgagcaaggaagaacttgaaggtatgtatgtgatgagaaaggcactgggcggcatgaagtctgaagaggcgctggagcagatcctggatatgtttatgcatacaaaagataatacagaattcgtcaacatgatccgccatacaaaaatgtggtaaaaaatattatgtgaaatacaaaaaaacgcttgcatactataaaaaagtatgataaaatttaaaagctgttttataatgacagaaatgggcatgaacgcccgatttgagataactcaagtgattattcctggttggcaatcaggaaagaatattagtgaggtgaataagatgagagaaggaatccatcctaagtattatcaggcaaaggtaacatgcaactgtggtaacgaattcgtaacaggttccacaaaacctgaaatccacgtagaaatctgttctaagtgtcattcattctacacaggccagcagaaagctgcttctgctcgcggacgtattgataagttcaatcgtaagtatggcatcaaacaggcataattagacgatagacggggctgccgcatcatttcgacagatcctctgccatccggattgtccatatcatggagaccggcgcagagatcagcagatgcgacagccctgttttttcattacggagaatagagattttccgttgcggcgggtgaatcacagattgtttcattccgtcagtaggaggaatatatgcgatatgcaactatcggcggacaggcagtcatcgaaggtgtcatgatgcgtaacggcaatgattatgcggtggccgtcagaaagccagatcagacaatagaagtcaagaaggatcagtatattggcctgaatgccagatggcatatgaagaagatcccgattatcaggggggtgctgtcatttattgattctcttgtgctgggtatgtctacactgacgtactcggccagtttttttgaagacgaagaggaagctgagaaagcgaaagaaaaagacagcaagtcggatgctgtttttatgggactgacagtggcattatcggtcgtgatcgccgttgtgctgtttatgctgacgccattttttatttcatctttgtttggtaaggtgattaagagtcctatgacattggctgtgattgaaggtctgatccgaattgcgattttctttatctatattgtagctatttcacagatgaaggatatacagagagtatttatgtatcatggagcggagcataagaccattaactgtattgagcatggcgctgaactgaccccggagaatgctgcgaagtattcaagactgcataaacgatgcggaacaagttttctgctgatcgttatggtggtcagtatcatctgttttatgtttatccgtgtggataacatggtgctgaagattgtgctccgcgttattcttgttccggtgatcgcaggcgtttcctttgaaatcattcagtgggctggcagaagtgaatcctgcctagtgaatattgtgagtaaaccaggactgatgctgcagaagctgacaacccgtgaaccggatctggagatgctggaggttgctattgcttctattgaggcgatttatgactggaggcagtttcaggcagagaacagggcagctgctgatgggaacagtcagaaaacggacaggagcaatgcaggagtgagtcagccatgatgcagtggagttatgatacccttttgaagtggggaacggatgaactgacagcgcacgatgtggagaatgcagctctggatgcatggtatctgttggagcatatttacgggatcggtcgagtggattttctgatgcgaagaagtgatagctttgatgcggcacagatggagaaaagcactgcttatcaggcgttgatccgacagagaagcgaagggtttccggtgcaatacctgacgggtagcacagaattcatgggtctgccttttttggtcaacgaacacgtactgatcccgagacaggatacagaggtgctggtggaaacagccctgtctatgatgaagccgggatgcagactgttggatatgtgtacaggttcggggtgcattgtgttaagccttgcaaagctgggaacggtgacatggggtatcggcgcagatatttccgaagaagcgttgaaggttgctgagagaaacagagaaaatctgggattatctcaggtgaagctggtacacagtgatctgtttggatcagtggagggcgtatttgatatgattgtatccaatccgccttacatccctacggatgacattgaagatctgatgcgtgaggtcaaagatcatgaaccgcatttggcattggacggaagtcgggatggactccatttttatagaaaactggcagaggaatcgggacggtatcttgtacccggcggttcactgctttttgaaatcggttatgatcaggggaaagctgtttcacagttgcttgatcaggcaggatttaaagatatacacgtgaagaaagatctggccggtctggacagagtcgtttatgcagtgaaagctgcagaagatggaggtaagtaacaatgtttgatagattagatgatattttaatccgatatcagcagatcatggaagagttaaatgatccggacgttgtcaatgatcagaagcatttccgcaagctgatgaaggagcagagtgatctgcagccccttgtagagaagtatacagaatataagaatacaaagcagaccatcgaagacagcctggagatgcttgaggtggaagacgatgaagagatgaaggaaatgcttaaggaagagctttctgaagcaaagtccaacatcgcgaagattgaacaggagctgaaagtccttctgatccctaaggatccaatggatgagaagaacgttatcgtagagatcagagccggtgcaggtggtgatgaggcagccctttttgctgctgaacttttccgtatgtattccaagtatgcagaatccaagcgctggaagatcgagatgatggatgtcagcgagaatggtatcggcggtttcaaggagtgtgttttcatggtcagcggcgatcatgtctattcacgtatgaagtttgaatctggtgtgcatcgtgtacagcgagtgcctgagacagagtctggcggccgtatccacacatctactgtaacagttgccatcatgccggaagctgaggaagtggatgttgagattgatatgaatgatgtacgtattgatgttatgcgtgcctccggtaatggtggtcagtgtgtcaatacaacagactctgcggtacgtctgacccataatccgacaggtatcgtcatctacagccagacagagaagtcacagctgcagaacaaagaaaaagccttcagattgctgcgttccaaacttcttgaaattgaaatagagaagaagcatgcggaagaagcagcccttcgcaagaaccaggttggtacaggagaccgatctgagaagatcagaacctacaacttcccacagggccgttgtacagagcatcgtatcaagctgacattgtacagactgggcgatattatgaatggtgacttggatgagatcattgacagtctgatcgcagcagatcaggcagccaaactggcgaatatggaagatgaataagaggttgacagcagactcaaaatgtgctagactactaaaatcttaataaaatgataactgaatagtgatggcaatgtgtcatcaaaggggagtagttttaatatattatcaacaatcgcggctgtttgcagatttttgtagagcagtctggtaatatataccattacggttacaagacttttgatgtatggtaacggaagatttccggatatcatacattaaaggtctttttcttttattaagatttaggaattaaggtgtgaaagaggacaaatcggacatctgaaaggaggaagtttgatgaaagaatggtatcagatgcgtgaggatgaagtgttggaagcccttggatcagatgcaaatgggctgagcagtgaaaaggcagaagccttattgaaaacgcatggagaaaatgtgctccgggagacgaagaagaaaagtgtatggcgtgtctttgcagagcagtttgcagatcttctggttattattcttatcattgctgcgattatttcaatgatctcgggaaatgtggagagcacggttgttatatttgcggttattacgatgaatgcgattcttggcacagtgcagcatgagaaagcagaaaaatcgcttgcaagtctgaaaaccctgtcagcaccaacggcaaaggtgctcaggggcggtgtgaagggggagattccttctgcacaggttgttaaaggggatattttgcttcttgaggccggtgatatggtgacggcggacggcagaattcttgaaagctattcattgcaggtgaatgaaagctcattgacgggcgaatccaccaatgttgagaagaagaccgtggtgttggaaggggagaaggcactgggagaccgtatcaatatggtttattcaggaagtctggtaaccgggggacgtgcggttgtactggtgacagctacgggcatggagaccgagatcggcaagattgcggcgcttatgaatgctacaaaggagaagagaacaccgctgcaggtgagccttgataaatttggcagccaactggccattgttattatgattatcagtgcagttgtgtttgtcttaagtctgtacaggaagatgccggtactggattcactgatgtttgcggtagcccttgcggtggctgcgatccctgaagctttgagctctattgtgaccattgtacaggccatgggaacacagaagatggccagggaacatgctattatcaaagatctgaaagcagtggagagcctcggatgtgtatctgtcatctgttcggacaaaacaggtacactgacgcaaaacaaaatgacggttcagcaggtttatattaatcatcagaccatgggagctgatgcactggacctgaagcagcagtctcatcggtatctgctctacgatgcaattctgactaatgattccgctattgtggaaggccagagtatcggtgatccgacggaagtggcgcttctggaaatgggaagaaaagcggacatcaaagaggatattctgaaagagatgatgcctcgtatggaggagataccatttgattcagacagaaaattgatgagtacaaagtatcgcctgcatggtgtgccgaccattctggttaagggcgccttggatattctgctgaagcgaacggacagaatccgtatcggggatgaagtccgtccgatcactgagcaggatgtaaaggagatattagataaaaatcaagctttttccgaacagggcttgagagtccttgcatttgcttataaggaggcacaagccaatcagcagttgacactggatgaggaagaccatctgattttcataggtctggtatccatgatcgatccgccgagagaagagtccagggaagctgtttcagaggcaaaaagagccggtatccgtccggtgatgattaccggtgatcacaagatcacagcaacagccattgctgaacagattggtattttcggtgagggagatatggcggtgacaggaccggaactggatgagatgagtgatgcagaactggatgagaacatcgaaaagatttctgtctatgcccgtgtttcacctgagaataaaatccgaattgtggatgcatggcagcgaaaaggcgcagtgacagccatgacaggcgatggtgtcaacgatgccccggccttgaaaaaggcagatatcggtgtggcgatggggattaccggcacggaagtatcaaaggatgcggcatccatgattctgacggatgataattttgccactatcatcaaggctgttgccaatggacgaaacgtttaccgcaatatcaagaatgcggttaagttcctgttatcaggcaatatggccggaatcatggcggtattgtatacatctcttgcagcacttccggtaccgtttcagccggtgcacctgttgtttatcaatctgctgacagactctcttccggccattgccattggtatggaaaaggcagaaaaagatctgctttcagaacagcctcgggatccaaagcagggaattctgacgaaagacctgatgacagcccttttcgtacagggcggtctgattgcagtctgtaccatgatcgctttttatatcggtttgtccacggacagtgcaacagccagttctatggcgtttgccacactgactttggcaagactgttccatggattcaactgcagaagcagacattccatcttcaaaatcggtctggcatccaatatttacagtgtcggtgctttcttcggcggtgtgctgctgttggcactggtcatctttgtacctgtgatgcgcacacttttcacagtgtcacctctgagcggttatcagattggaatgattgcgctgctggcctttataccgaccgtcatcattcagctgtataaagtgatgaaagaacatgttcatgcataatgtgtaacgtgttcacaaaaatcgtcatcagaaaaacgtcgtgaataaaagaacagatcagaagaatggcagagagcctgataacggttttctgccgtttcttttgccggggcatttggaatatttggcatgttcagagacaacggtctggtgctgattatggcacctttgtcggagagccatttgatgtgcgccagtgtttcacccatagcaaaccatttttgattcggtgaaaaatcgctccatgcgcggcctctggaagaccagctgatccggccggcagtctcataggcagtgcagtcgggatgatggtcaatggcgtcaaggatttcttttaaacgcgcatgatggtgaagggccagggcattgatgcgatcatgaatatctccgtgaaattctctgtgtcccggaaatgtatgggaaaccttcagaccctttattttctgcaggctttccagatagtctgccagtgagtaaggaatatttcgccatacagagatattcggtgtgatatcaaaaagaatatggtcccctgaaaaaaagatttctttgtcttctatataaagacaggtatgtcccggtgtgtgccccggtgtctggatacagcgaagggtgataccaccaactgttagcagatcattgtcgctgactttggaggcaggaaaagggtgatgcggtgagtaaagtcttgcctgattgccctttttctgtttttcgatttcttccataggaaagccttcgctgagaaaaatctgttccatggcctgccatccgccggaggcaagctcctgacagagataatcataatcaatggcattcatgaaaacaggaacgcctctggccgtcagttcttctgtgaggccgctgtgatctccgtgaagatgggtgagaaaaagctttgtatgggcaaaatccacttgcagctcatcaagtccgtcaaaaagtgcctgcttacattccgggcggttaaagccggtgtcaatgatcaatgtttcaccatctgaaacaagaacatagcagttgagatatttcaatgggttgtcagggagcgggacataaattctgtaaatatccggggtgtgataaagttgttcgaccataaggggattcctttcttcatatatgcgttgtataattatgcgaaatacaggtattggaattgtcgcaatagaggcagcgtcaatataatctgcagctgcgattggttgttgagttctgaattataaaaattatatcatggattcaatggaaaaaataattgatttttcaaataaaaagtcgaaaaatatgatacaatgtttattaaacattaagcagatacgaggtattgaatatggaaagaaatatagatttaaatgagatttcagatggccgtttctatacagccaatgatatggtcagggcagattgccagggatgtgaaggatgttccgtctgttgtcacggaatgggaaagtccattctattggatccattagatgtccataggatatgtacttattttcgtattccgtttgaagcgctgttggcggatcatgtggagttaaatgttgtggacggaatgatcctgccgaatctcaagatggtaggtgaagatgaacactgtattttcctgaatcaggagggcagatgcggtatccataaaatcagaccggggttctgccgtctgttcccattgggaagactgtatgaggacagaagtttcaaatacattcttcagacaaaggaatgtgtgaaaacggatcgtcagaagatcaaggtcagaaaatggctggatataccggaattagatcagtatgagaagtttgtcaatgactggcactattttctgaaggatgtagctgcatcattgaggaaagaaaatgccagtgacggcaccatcaagcaaattaatatttatgttcttaaagaattttatatgcgcggttttggtgaagaagtcagtttttatgctcaatttgagcaaagattgaaggaagtcaaggcagttttactgaaataagaagtgacattgtgcatatttatcaaaatgaaataaaatcctttcaaaaattggttctattcttgtattgaaaggattttgtttttttgttaaaatatagacgaatttgaggattaaacaatacaaaggagagagacgagcatgaaacaattctcggtagcagtgaataagattgaagacggcattctgcatgtccgttcagcaggactgattatgaaagaggcatcacagtttgcttcagatgttaaagtgacaaaggatgagaagacagtcaatggcaaggatattctggaatggatgggattaaagcttgcagttggcgatgtcatcaccgttaatattgagggaccggacgaagaagctgcggccgacagctttgaagtattcttgaaccgtcagttttcataatttcatcaacaaaatgccagcagttcatcatgagctgctttttttgttgcacaggagcgtgcggcgcattcttttttgtactttagcgcactgtttttatatgttataatagcatgagcagatgtagattgcaggtaaatggagggcgtcatcatgagcacatccggtcagaagagaatagaatcaacaatagatacagccattgattgtgatgaagatgaagtgatggaactggcgatgcaggcaggcgaactactgctggagaatggtgcagagattttcagggtggaagaaaccatggaccgaatctgcagatattacggtgttgaatcggccagtcagtttatcttgatgaattatattctggcaacagccggtgaagggcatgggcatatgtttgcaaaggtacggcacataccagtgaacggttctcatctggataaagtggcagcggtgaatcagctttcaagagaaatcgcggaaggaaaatatacggtttcagaagcttatcaggcattggagacgattcgccggatgccggacaagagaaaaagcgtgctgattctggcttcaggtgtggcaagcggtgctttctgctgccttttcggaggcaatctgatggattgtctggcggcagccattgcaggatttttgatctatgtctatattctttatatcagcagtccgcatttgtcaaagattgtgggtaatgtgggcggcggcgcttttgtgacgctggtctgcaatctcctttatatgctgggactgggggaccatctgaattttatgatcattggctctatgatgccgctggttccgggtgtcgcttttactgttgcgattcgtgatgcggcagatggagattacatttcaggtactgtgcggatgattgacgcactgcttgtttttatctgtattgccattggtgtcggtatgggaattgcagtgttgaaactgttgacgggaggtgctgacttatgatgatccaaatcatagccgctgtgatagcgacagtgggattttcggttttgtttggtgtaccatcaaagtactatccttattgcggtgtcattggtggagcgggctggcttgtctacctgctgactttggaacatttcagcacagcaggtgcatccctggcggccactatggtggtcattttcttatccagattggcagcagtgcggaaaaagtgtccggtgaccattttcctgatcgcagggatatttccactggtgccgggcgccggtgtgtattggacagcctattacattgtgacagatcagttgcggctggcggccgagacaggctacacggcagtgaaagtggcggtggctatcgtgctgggaattgtgtttatatttgaactgccgcaggggttatttgtcaggctggcaggaaataagtaaaaataaaactaaagatagaactcaattgaagattaaaagcggttgagttttagataaacgagtgaattcgaaatatattttggaggggttgaaatgacgaaagaagaattaacgctggaagtcatccggcgtttgaaagtggcctatcctctggcggaatgtactctggattatgaccaggcatggaagttactggtcagtgtccggcttgctgcccagtgtacagatgccagagtgaatgtagtggtagaaggattgtatgagaaatatccggatgtggcctctctggcagcagcggatgtgactgatattgaggaaattgtccgtccttgtggacttggaaagagcaaggccagagatatcagcgcctgcatgaagatactccatgaacagtatcatgataaggtaccggatgattttaatgcactgctgaaattgccgggggttggacgaaagagtgcgaatctgatcatgggggatgtttttggcaaaccggccattgtaaccgatacccactgtatccgtctggtcaatagaattggcatcgtggacggtatcaaagacccgaaaaaggtggagatggctctgtggaaactggtgccgccggaggagggcagtgatttctgtcatcgtctggttgaacatggacgggaagtctgtacggcaagaacgaagccttattgcgataaatgctgtctggcggatatttgcgcgcggaatatataatagagcgacaacaagaaaagtaaagcgtgaaggctccagccgtaagggaaaatggatagtattatgacagaaaattgtatataagtggagataataaaagatggggattgtattaggtatagatataggaagttctgcaacaaagattgttgcaatggacgaaagtaaaacaattttaaattcactgaaggtttcggcttctgatccggtgacagccatgtacggagccgttggaaaaatactctgtgaggagagaatgcagattgcagatgttgaggccgtgatgcttacaggtatgggggccagttatgtggaaggggatgtctatggccttccgaccacgaaagtgacggaatttgatgcgctgggaacaggcggcctctatctgactgggcttgaagaaacggttgtgggcagtatcggcacaggtactgtttttgttcatgcaggccctgatggcattcagcatatcggcggcagtgctgtgggcggcggcacactggtgggtctttcctcaagacttttcggtatccgtgatgtggaagtgattgcggatatggcagaacagggcaatctgaagaatgtggactggggcattgcagaactgagcagagaccagatggagacattgccggattatgcgacatcttccaatctgggaaagatgaagagtacggcgaccaatgaagatgtggctctggggctgatgaatatgattttccagacagcaggaacactggctgtatttgcctgcagaaatgtgaatttaaaaaaggcggttatcggcggttcaacagccactttgaatcaggcaagaattatgctggggcaggttggtgagctgtatgatattgattttatcataccgaagcaggcggcttatatgacagctataggggcagcatttttatttcagtcgaagtaagattttgattgagatagaacagtaaaatagaattaaaggacaaaaacaaagagttaagggacacgacatctttgaaatgtcaaattgtgttaaaatcattgtcggaactatggcaaaagggaaagatatcatgttgaagattgcagtgatagatgatgaggagtattacagtgaactcatccgtcagactgtgtgcaactggctgctggaaaagggctgtcagggtgaaattgactgttttgatcatgcagatgatttcaagactcagattgaaaatggcagatgctatgatatttattttatggatatcgagatgccggatatcagcggcatggaactggcctcctatgttcgtatgaaatatgactcaccgtttattgtttttgtgacggcacatatggaatacagtgtgaagtgctatcgttatcatgcctggcagtacataacaaaagacagtatacgaacactgataccggagaccatggattcgctcattcagcatttgcaggcacataaatccaattattatatgatcgaaggggcgaatgatctcattcgtattgcctatgatcagatccagtatctgagcaaagatggcaaatataccctgtttcataccggcaaaccggaggtattcagagaacgccgggcgctttcaaaggtgattgaagatatgcagcaggtggatgacgcttttagtatgacggacaaaagttatggcgtgaatatacgtcatgtgctgcggttaaaagatcatatgctgaccatgcgaaatggtgacagcgtgccgatcagccttccgagatatcagcaggtcaaaaaggctatcagcgattattgggggcggcgggcatggaaatagcagggattaccctacgagtgctggaaatcgcaacagtgattctgtgcggcatcagattagctgtaccaccgggacatttccggtgggaacggctgtggacgaaggtattattttgtattggtataattttttggttagtcattaatatagctaacatttatttttttagattttcttcagtgacggaagctataacaggttgcggcttgtttatttggttaattattttttatagtacatacttttggcagttgtttgcacaattttttgtatattggtataccgtttatgcctttagacatttatatgtttttacattgtgctatttagaacatattcatttgcagaactatgtaacgattgcggatggtcttggatggcattggattcatatttgtggaatggcagtgacgattattgctgtaacagggctatgctattttatgcatgctaaaccattgttttatcgaagatataaaagagattacaaatatttggctgcatatgttacattagaaatagtaattggagaaatactctttaataatgaaattgaaggaaattttatacagggagattatatcctgtttagtataattgtttttgtatgcctattcagtctcttgtcagcgattattttttacaaaggttataaggatatgtggtatcagcagcagatttctgatataaattttgaaattttgaagagacaatatgagacaattcagaaggtgtatacagagaaaagaatgttgctgcatgattctgttcaccaggatgtgctgatattggaatatttacagaatggtaaatatagagaagcacagacatattttgaaaagaagatcgcagcaactaaaaagaagagtaaaaatagatatacagggatagaagtgttaaatctgatgctgaattatgaaatagaacaggcagaagaaaaggcaattcgtgtaaaatgtgctgttgaggtgtatcattgtcctgtggatgagactgagttatgtattattataggtaatttatttgataatgctattgaggcagccaaagatcttccagatgaacagagacagattgatttctctatacaaaatcccaatggtatttttcgcatagaaataacaaacccttatgagggtgagagaagaaaggtagaacatcattatctgaccacgaagaaggaaaatacagaaatgcatggtttaggtttaatgagtgttcaaaaaattgtggaaaagtatgatggattaatggaaatcagtgataaagacaacgtattcagagttgttgttacgttatgatgaagagaggtaataacgaatgcaagagttagaattaacagaaaagctgttaaaagagatagaatatattgagaaattacaagaagcagaagagtttgatgttgagaaatttacaggtcagggtggtggaatttacacattattttgttgttgattatcaaaaaggtgcctacagtgataggcacctttttgatttgaaaaataaatttgtagacaatggctcttaacttggtggatattgaaatggatagtagaactttattacagataataaataaaggtgaaaaagcaaagcaattttgggaaaaatttttaggcaaagatatactggatgaattgttaaagtatcctgagcttttgagtatgcaggatgcgaaacgtgcaaaggttacaaaagaagaaaaagagttttttgttaaatgcatattcagtgtaagtacagaaaatggatttaaatttgaaagagaagaacgagtttttgatagtttttatgagaaattgggtcagtatattagaattattttgaaacaaaagctgattgcttcactagtagaaaatatgatagacagtctggtaaaacaaatagttcagagagtttttgggattcccttcagatgtttgataacagatatgcatgagaaaaaagatgctgggcaattaaatggtcattcaagtacagaagaatatgatgattatgtgagtaagtacttactgaatgagagagaatgcagagagtttctaaaaaaatatccgattatgacagagttgttgattcgtaaaatcagagattatattaattatgtggatgaaatacttcagcatttttatcaggacagagaaacaatcagcaaagaatttcatattgagcaaaacactatggaaatcacaaaaatatcttttaatcaggatgaagaacattttccgggaagaatggtggcacaggtttcactaaaaagtggagagaaaatttattataaaccccattctttattattgacagaacagtaccagaaaatagaaaactggttatgggagaagatgggactagaaaaatcaaggcatttggtgacgtcgagggatgattatggttgggaacaggaagtaactgaagctgaatgtatgtgtgaaaaggaaattaagaaatattattatcggtgtggtgcggaatgctgtcttgcttatgtacttggaatgacagatattcatatggataatgtcatagcacacggaaagtacccggtcattattgatacagaatttatgtttgatcgccgaattgaagttggtacacaaagaaaaaatttgcagcagaatttgatggatacagtgatacatacgggatttgtgccgaacggaatgggaacaatgcatgtaaatgtttctgttttgaatgcatgtgatgaacagagattgcctgtaaaaatgcctatggtcattcataaaggtacgtctgagatgaatatttcctatcactatccaaaattatcacataaaaagaatatgccaatatatgaggggaaatatataagttttgaaaattatatgaatgaatttataagtggtttcagaagagcatatgactgtattaaagcggatccagaagtattggtggggatgtgtcaaccaataatgaagaagagcgtaagatatctttttagaaatacacaggaatattatatgtacattaccagtttcaattttccggagttgatgaggaatcaggcaaaaagacagttatccttatggcatatgaacagagggcttcattgtaatgaaacgtatcgggtaaaaattcttatttatgagatgcaatgtgtctatgatggaatcgttccgattttttatgcagacggtaaaaatctgttgatgggggatgacgaatatatagaaaattattttcaaagagataatgaacagcagctgcaattaagagtggaaaaattatcagattgggataaggattttcagacgaaagtcattcaaagtgctttactgatgtatgccaaaaagaaagacaactgggacggacaactgggacagccgcagccgaaaataggagaattgacagctgaaagaattgcaaagtgggtgttcaatgctgctgttttaacaggagacaaaatggaatggaccagtgtcatttatggtaaagatggctggacaaaagccggcaaagcagatatttatttatacaatggtttaagtggcatattgcttttctttgaagcaatgtggcagaaaaaacgtgaaaacacctatcattcagtggttgaacaattgaaaaaacagttatttgaacatacagatactttaattcaggatggcagcaaccgccaaaatgacaagatgggactgtttgatggagaagcagccgttgcctttacgtattggataatgtataagtttacagcagaagaaagctatatgatttatgctaagaaacagtgccagtttattttgaacaatgctcatcaggtgtctagtgatgatttaatacagggaagagcgggaatcattattttaatgtcgcttatgtatgaggaaacacaggataggatgtatcttgatactgctcagaaagtaggcaaaaatttagtagagagtattcaatcggagaactgccttgcaggtatggcacatggatacagcgggatggcagtggcaatggctttattgggaaaatatacaggagaagaaaattataaagaaattgtgttggagttatgccgaaaggaggatcagttatttgattattcaatgaataattggtgtgatattcgagaaggaaaagaaaatcctagaaatactgttgcatggtgtcatggcagtgcaggaatacttttggcacgtgcactgattcataagataagtagattgacaacgaatcagctttttaaggatattccattgaatcaggtgatagatcaaatgtgtcagacagaaaaaacagattggtgtttatgtcatggacaggctggtttgttggtaatagaaagatacattcgtcatgtctttgattatgaagaagaaaaatggtatgagaatgcgacaaaatatttagataaacgactatcaattgaagatattttgaattatggcataatgcagggattagccgggataggaatgcttctgttattttgggagtgggaaagagataaaggcacaaaatagagagataaggtaattcgccttatagatgattaataatatgatatgattcgtatacaacacaagtaaaccactatccacaaaaagattggaggaacattatgaaaaagaaaagtaaattaatggtagcagtatttgcacttattttaggtgtgtcaacagttatgccgggaatgcaggcacaggcatcagatatgaataagttcccagttcaaaacagaacaacacatgacaaaagtcacacagcgggcttgcagacgtttcttttaaactatcatataaaaacaaaagatattatcaaatctcatggaatggtagatggcagttttggtgatggaactgcagatgctgtttcagaataccaggatttaagaggtcttaaggtagatggcagttgtgggcgtatcacatggatagatatacaaactcaaatacgaaattgtaaaacaacaacatcaaatagctgggagttttatagactgaatgcaacatattataattctggtaaatctttaaaaaggcgaatatcagattcacgctgggaagcttggtatggcaatccgagtgatacagatggcagtacagttatgtggcattatgtaggataaaattaactaaaaggtggatagtggtttatttaagtagtgatagttgggaatgaggggaagaaagatgaacttaacaagatatgcatgctttggagtgttgatggttttgatattgacaggctgtcaggcaacacctaatcaggacgtcattgctaataagaatgatcagcaggtgagtcagagtgaatcaggtacatctatagaggaatcaaatagtgtggaggaaagtgatgatgatgggactgttgtgtcggaagcaatttctgaaacgttttcttctgatgatgggaatgtgacaattagtgtgcaaacggatgcggtaaaagtacatagtgtaccgattgtacagacagaagcgaaagatatttcggtggatgatgtgaagcgatgggcaaaggctttttatggaacagaagatgtttatgaagccacaaagcaaatgacaaagtcagaaattgaggaggctattctctggcgtcagcagaagataaatgatagagaaagtttaatagaagaaggatatagtgaagctgatgcggatacgatgattgaatattacaaagagcaaattgagagtttaaaagcaagttatcaaaaagcaccggatgatgatgaacgaaaaaaacggattgggcatttcatcctttatcttattatgatgatgattcaatggaaaatgatagagatacaagtaatgcagataagacacaggcattaaaggtgcagggggagagtgacggtcaaaaagcttatgttagtgccagtaatagagaaactgcagactatcaattgcattctttgatgttttactggaatgatgaggatgaaggttggatagatggagctactccttatgtgaatcaggaagaagcgattcgaattacagatgagaagctgaaggcgttagtagatggaaactggaaggtgaatacggtctggtctagcagtaatcagtggcatattcaatatattccggttataaatgaattgccatgtctttatagtgatattaattacacttcggatgatgcttatgctgcgaatttagagtatggacaaattaattttacacttacagatgacaaaattgtagctgtagagtgggaatctccaatggaaataacctcaaccgatagtcagcctgcagaaatgttgccttttgatgatatttatacggcctttaaaaattatatgcaggtgaaatgtaccttaaattcattgggattggcatcggaggatgaaacagaaggtacagagcaggcctttgccaatgtgaatgatatcagccagatgtactgccgtgtgaaggaaaaaaatgcagacaatgtatttcaatatgtaccagtttatgtattcagcggttatgtaagtcagggagattataaagaagatgattgggtgaatcatttttgcgtggtaaatgccacggatggcacaattattaatacctggttaggatattaattgcagaggagggaagccgccacacatggggttagcggaataataatttttttctattttgggagtgggaaagagataaagacacaaaattgggagataaggtaatatgtctcatagatggttaataatgtgatatgattcgtatacaacacaagtaaaccactatccacaaaaaagattggaggaacattatgaaaaagaaaagtaaattaatggcagcagtatttgcacttatttagggcgtgtcaacagttatgccgggaatgcaggcacaggcataaaatatgcataactttaccccacagaatatgtcatcatattcaacgaaacttacggctggtcttcaaacatttttgttaaattacagcaaagatacaaaagactatatccgagacaatggtatgatagatggtcagtatggtacggccaccagagatgcagttaaattatttcagaaagatcaaaatcttgagagggatggcaagtgtggaaagaatacatggtcacgtatagaatggtatattatgaactctacgtttaagataaagggaagctggtatttttatgaattacatgcaacttattataattctggtaattctttagcttattgtccgtcaaaggatctgtggcgtggatattatgaaggctccggaagtatatctagcatcaaacttggatggcatgatatcggataattttgccggatatatttggagtataaaaatgaaagcacgaaattatataggtttaatgatattgacatcgttgttattatctggctgtcaagccacaccggctcaggatattgttgccaacaagaatgatcatcagacggaacaatcgaaagcagaatcagttgtagactcaacggaagttgcagacgatgaaaagattgtttcagaaggatattctgaatcctttgcttctgatagcggtgatgtgataatcaacattcaggttggacaggtgaaagtgcggcctataccagttatgcaggcggaagcgcaggatatttcggtggacgatgtgaagcaatggtccaaggccttctttggtacagaagatgtctatgagggaaacagtcagatgacgaagtcagaaattcaggaagaaattcttttacgtcagcagtggatcaatgatagagatcgattaatcacagaagagggatatacagaagaagcggcagatgcagtgattcagtcttatcaggaggaaatagataatctcaaagccaattatgaaagtgcacctgaagatgatgatagacaaaagacagactggacattccatcctgcttcctattatatgaaaacggctgaagacggtgaagatgaagattggagcaatctggataaaacagacaagttaaaggtcatcggtgattgtgacggcaagatggcttatgtgagtgccagcaacagatcaacaccggattatcaactgcacagcattatgttttactgggatgatgaacaagcaggttgggagaacaatggaaaatcatctatcagccaggaggaggctgtgaagctgacaaatcagaaactaaaggaattgacagatggtgaatggacggtgaatgctgtctggtcaataggcaatcaatggcgtatccagtatgttccgagtattgatcagataccttgtgtttgcagtaccattgattatactgcggatgatacttatgcatcgaatctggattatgagcagattgatttttcagtgacggatgatcaaattgtatctgcggaatgggatacaccgacgaaggtgacatctgcagacagccagacgtcagagctgaaatcctttgctgaactatatgatgcctttaaaacatatatgaaagtgagcaccagtgtcagctcattggggttgatggaagacaattccgaagatgcagctgtgaatatcacgaaaatccagcagatgtattgccgtgtaaaggagaaaaatacagataatacatatcagtatgtaccggtgtatgcatttcttggaaaaatcagtgtaagcggaacagaagatacaaatgacagtatcttttgcttaattcatgcaatagacggcacgatcattaatgctggtttagggtattgataatgtgaattgaaaaacgatgttagcaggaaatacctgattggcatcgttttttagaatatttttcgaggttgtcagatttgctttcttttttgctaatacaaagatataatgatgcatttttatgcctgtgaattttataatacagtcagaaaatgttaaagcaaggcaggaggaaagcacgatgaagataagaaaatatgcatgtatagccatctcagcggcactattgatgacaggctgtcaggccacgccggatcaggatattgtggccaacaagaatgataatcaggccagtcagaatgaaacgagccagtccgttgatgataccattgccattgacgaaaacgcagatggaaaggttgtatctgaagcaatttctgattcctttgattccacggaaggtgatgtaacaattaaggttcaggcagatcaggtgagagcaaagaatgtaccggttctgcaggcggaggcgcagtctgtatctgcggatgatgtgaagcggtggtgtaatgttttctttggcacagaggatgtctatgaatatcgggatgagatgacgaaatcggatatcgaggaagccattctctggcgtcagcagaagatcagtgacagggatggtttactggcagaagggtacacggaggatgagatagatagtactattgagttgtatcaggaggagattaataatttgaaatcaaattatgattcagcaccagaaaaatatgaaggaacaaagacggactgggagtttcatccagcatcctactggatgaaagacgagacgaatggtgatgatgaggactggagtaaagaggacaaaacggaatctctggaggtaagaggagattatgaaggcaaaggagcacatatcagtgccagcaatcggcaggatgcagactatcaggtgcatgatatgttttttgtactgaatgatgaagtggatatcaattacaatgctgatcctgtcatcagccgggaggaagccattcaaatgaccagtgagaagctgaaggcactgacggataaggaatggcaggtagattcagttgacaataatggcaatcagtggcgaatcaaatatgtgcctgtcatcaataaccttccgtgtcttttaacagatctatcctatgacagtacggatgcctatgcggcaaatctgacctatgaaatgctggagtttgaaataatagatggtcagattacatctgtggagtgggattctccgatgaaaataacttcagcggataatcagccagcagaaatgttgccttttgatgatatttatacggcctttaaaaattatatgcaggtgaaatgtaccatgacatcacttggtatggcttcagatgatgagatggaggatgaaacgacagcagagacagaaaaggtctgtgcgaatgtgaatgatattcgtcagatgtattgccgtgtgaaggttaaaaattcggatcaggcctttgaatatgtgccagtttatgttttcagtggttacgcaagccagggagattacaaagaagattggtgggtcaaccatttttgtgtggtaaatgcgacagatggcacaattatcaatacctggttaggttattaaaagaaacagataggaagaaaatgttagcatatgataaaaaacaaatcggccggattcaccggattctgattccggctgtgatttttacggcggctgtgctgttgggaaggatggataccatcatggcagactttggtcagtcagaacccctggcagcgggaaaggccctgagctttgcctttgaatccctgacaaccggcaatgcgctgctggtggcaccggtgatctgtgctttcccatatggcgctgcctgtattgatgaggtcaaatccggtatgttcaaaaatgtcctttacaggacggataaagcaagttatattcattcgaaggcagcagcctgcatgctgtccggcgcagtgactctgatgggggctgcgcttttggtgattcttataagtgcggttttgctgatgccattggaaacagcttcagggactgcgaatgcggcacaggcagcagatattgcagatactgcaggtgctaccggggagattgcccagagctatgagattcagcagttgataggccttgttttccggtatggctgttttggggcggtgtggtcactggtggggatgctgctgtccttatggacatttaaccggatgatggcctggattgggccttttattgtggattacctgttggagattgtgtatgagcgttattttgatgctttgaaattattgtatccaaaggaatggctggtgatgagctggagctggcctctgaaggactggggaatctgtctgtggctgctgcttctggcaggaatgatttatctggtggtaagaagaacagggatgaggtgtctggaacgtgtggtataaaggaaaaatggtgctgtcggtggcttcctataatttcctccgatggcacaaaaatgcaagggttgtaaccgcctttctgctggattttattctctgttaccttctgacagacaaagcggtacagtttgccctggagcgggacacaaccatgcagatttttgaagctttcatatggacatttggagacagcaatgcgattttgcttgtgtcactgctgttgttgattttatttgcggatatgccctttatcaccacggcaacgcctttttatctgatgcggactacaaggcgtgtgtgggttgtggggcagatggtgtatgtggcgctggccactatgcttttcatgatatttacacttttttccacggtggtattgactatgcagaatgcttttgcaggcaaccggtggagccggacggcggcggcactggcttattccggcagcggcaaagaactgaatctgccgtcagcggtgaaagctatcgagatgagccggccatggcagagtatgctctgggtattggcgctgatgctgctttataccctggtgatggtgttggtcatgctgttgtttaatatatggaaaggacagatagcggggattgcagcggtgatttccttcagctgttacggtctgctgctgaatccggacaatattaagaaggtgctgcatctgccggatcagttaagctacaaggccagagtgctggtggggtggatatcgcccctgaatcaggcaaccttttatatgcataattttggctatgataagctgccaacattgggacagactgtggcaatcggccttgctttactggcagtattgttgatattaaccatatgtgccattcgtcggtatgcattttcattcagcggaacggagggaaaataatgcgtgatgtgatcagggtcatggatgtgagcaaaagttttggcgaggagaccgtgctgcatcatatcagttatgattttaaggaaggccggatttacggcattgtgggcaacaacggcagcggcaagaccgtgctgatgaaatgtatctgcggatttctgattccggattccggtgaaattaccgtgaattataagcgaatcggcaaagatatggattttcctccggatacggggattatcattgaaacaccgggatttttgccgaatctcacaggtatgagaaatcttgaactgctggcatctcttcgaaaaaaaattgacaaaaaggcagtggcccaggctattcgggaagtagggctggatccggagatgaagaagccggtcagcaagtattcccttggcatgaggcagcgccttggtattgcacaggcgctgatggaggatccctccctgctgattctggatgagccctttaacggcctggacaagcatggtgtcagtcagatgcatgaactgatactggctcagaagaaaaagggcaagacgattttgctttccagtcacagtcagaaggatatcgatgtgctctgtgatgtggtctgtgagatggacggcggtgtgatgcattgcatcagatacaggatggaggatacatatgcaggatgatcgtgaagataaggcaggagtgcaggatgccgataactgtctctgcaggttaaaggatattgtcaaatggtatccgccggatcgcctggtgctggatcagttttcactggaaattggccggggcgaacgggtcatgatcagaggaaatgccggcagcggacggacaaccctgatcaggattttagatcagaaaataaagcccaatgagggaactttattatgcagaggcagtatagcggccatctatgaaacaacgggaattctggaatccatgacactgggagagcagattgccctgccccttttgtgtcagggatacagcagacgggaagccatggctcatgcttcagagtggctgaaaaagattggtgaggaaattcgggaatatcataaggaagaccggatcacagcctacgaccgggcattgatcgctgtgggacaggctgttttgcagaacccggatctgattgcggcagatacttttatgacggacctgaaccgggctgaacaggcgagaatattgaaaatactggatgatgcatcaaaggatagggcttgtctgttgatgacagatgagattttttgtggttttccatgtgacaggatattggagctgcgaaagcctatggacagacagccggcagacaacatgagttggacttgaatggatgaaaaggagcgttagatataagatgaggaaaaggttattggcttttttgatggtcttatgcctgtgtcagatgccgcagatggtgtgggccgcagaagtaacagagaaaatgctgcagggcacagaaacagagaaattaacagaggcagaaacggtgccggagtctgaaaaacagacggagactgaaaagaatcagagtgaatctgaacagacggaatccaatcagtccgatgttatatttcagattgatgatacgcacatttatgagggtatggaaaaagcttataaagatggttatgaaccaacagtggccgatgacaaggtacagatggtgctgcctcttgtggcggaagatatgaaagcggtctcttctgtgacagtgacaccgaatctgggtgatgccggtacggtgccttttgtctacaaaaattaccagaaaacatttaaggcaacggaggagacggtgaatggaacaaaggataagaagcaggtttttcttgtcagttatacatttccgttgaaatcagatcggaagaatgggacatatccggttgtttttgatgtatcagcgaaggccgatggtcaggaaattcagcagagttttactctttatgtgaccattgccgatgaaaagaaaaaggacactgtgaaaaaagacagtacatccgatgtgtccgtgagcaatgatggggacggcagttctgatgaggcagaaaagcctacatccgaaccaaagctgattattacaaaatgccagtccgatcctgaacgtctggaggcgggcaaagattttacactgaatgtggaaatcaagaatacaagcaagattaaatacgtccagaacatgaccattgatgtgacctgtgcagagacgaatctgacattaaaggcagacggcaatacatttttctttgatcgtctcggaagtaatgagacattaaaactgcctctgacattttccgcgtcagcggggatacaggaaggacgttatgatatccagctgagtatgtcctatgataatccggatgcctcttcactttcttcatcgggaacgatttcagtggatatacatcagccgcttagagtggaactggaagcggatgagctgccggacagtattaatgccggtgatactatgaacatcaatgtgcaggcactgaatctgggcaaaggggccatttacaatgcccgctgcgtggtggatgcaccgggattgtcaacgggcaccagtgcttatatcggaagcgtagaagccggcagtgcagcaaatggtactttgaaaatatttgccggcatgaaggagtcatcagcagatggtgagatgtacggggagacttccggcaaacttattctttcttatgaagatgaggatggtcagacttacacggcggagaaagaaatcagcacagtgatcaatccgctggatctcagtacggacagcagccagacagaggagaaaaagcaaggcgttagtctgcagtggtatatcggtgtcattgccgctgctgttattcttggcacggcaggagtgattatttacagaagaaaggcaaaacagcatgagcaggaataagaaaggccgatggtggtatcttgctttcaaaactttgagcctgagagaaattttattgccggtcattggttttgcgatttcctttgtatggatctggaatgccgcagggcagtatctgaatctgtttaaagaacttcaaaaacctgttgttatccaggcggaaatgtttcagaatctatcttcagatatgcggacatctatcctgtccatgcagggggtggaggctttgacaccttattcagagcagacagcagtgatgcagtgggaagattacagcggtgaagtcagcgtttattatgtggaaagtgattatatgaaatggctgtccggtcaggccgtgacagcgggagtacctttttcagggggcatgccctatggtattgtatccgagaaagcccttgaaaacctgaaaaagaaaacagaagagcaatcccgtatcacatccatgcagtcggaaagtgagtcggcagcagatgaaaacagggtgatagacagaagcagtcagaaagataagaaaaagcaggggttggcactggaaaaggaagatttactgaaggactttaccctggatgacagtcagtctgtgcgcttatacggcattgatcagaacgaacagctgccgggaatttatctgtcagatcagtgggcagatacctcggatgagatgggctttaccgtgagcggcggaggaatgtcagcggatccggaggggagtgatatgccggctgatcctggagacttagatatgtatgctgaaagtgccggaaaggacagtatgaattcgaaaaaatctgcaagcacttccaataattcaaacagcagcaaaataacggagcgcacaggaacagatcggtctgacagcactgcagttgatgaggggcagcaggtgtctgtgaagctgatgatcgctgtgaagaatggttttaatgtatccccggtgataaaggaactggaacaatttcaaatcagtgccaaaagtgatgtgacagatgttatcaggcaaacaaacgagaaaaatattttccgtctggagacaggtgctatgattcttatctgtgccatctttatgatgcaaatgagtgaacgtgtctggaaaattctgcatgtcaggtggctggaggatatccggcgatttggtgcagaaaagaaaggtgatcgaaaactcctgcacaggcgccggctgatgattgccggtctgggattgatcggaagttttgcatggcaatggatctcaatgttgtatggatggctgtaaagggctgtcaataaaatcatgtagatgcaggcggcggattggcaattgtaaaaattcatatttcagagttaaaaacttctatggacgagatcactttagcggtgtgacattctgtaggagttttttttgatggagcggatgttttgactttaagagaaaaaaggatgtgtttattctggtttcttacgttttttgagacgaaaaatgttgattgaataggaaatttggttttataaaaacttaagaaaaaaggatgtcgaaagtgcttggcaatcagtggagacaggtgtataatagcgtcaatatttcatttctgataaggctgtctgccgattctgatgcaggcagagaattccattgtacgaaagataaattgaatagagaagacagcgtattttgtctgcagtgactgttttgaactgcagcagggcgaggaaggtgattgcgattgccagaagtgtttgaaagcgcagataaccgttaccgggtagaacgatatcttggcgaaggcggttcgggaagagtctatcttgttgtctgtcaggaagacagctgctgctatgcattaaaggtatctgcggatgatgaagtatccagagtttcgttatatcgtgaggcgcgtattttatcatcggttgtgcatcctgcatttcctactgtcagggagatatgggaggcacatggcagggtttgtctggtgatgtcctatatcaggggaagaacattgcagatgctgatgaacaggaaattgtatcagggagagaagtgttttgaaccggatgaggtactgccgtggatgatgcaattggcggagggactgtcgtatttacataggcacagtgtcatataccgggatctgaaaccttccaatgtgatggtgactgactccggacagctgggcctgattgattttggtgccacctgcattcttggagatgggatggaggttggtgagatgggaacaccgggatttgcaccaccggagcagtacagtcatgtgtgcggtccgggcccatggacggatgtgtatggatttggcgctttgctgcactttcttttaacgggagattatccggcagagaagatatttttttttagagagatcagactctgtccgaaaccgggcagacaatggtcggtgggagagagagtcttcaggagaagacagctgaggattatgaatcagctggttttggaatgtacagccagagagcctgaaaagagacggacttcctggcgaaggatcagtcggatgttgtatgctgccagtaaagatgcttccagaagaaggcggatgttttttagacgattaagcataggaatagcgggcctattcttgaccttttacttaagtctgtcagccttcgccaactattggagatcggcagcttatgaaaggacacttgatcaggctgaatcagcagatgcagaaagtatactgttgaatgccatcggaatgatgccggagagaatagatgcctatcaggccttatatgatgcttatatgcaggatggcctgctttctgaggaggaatggcagcagatacagaagctgatgcgtctgaacagagagtacctgaaggcggatgaggccaagttggtgatactcagttaccagttgggaatcgctgtgtatcttcaatcggatgccgggatttccaagggacaggcagctgcctggtttcagaatgttgaagaagcggatatggaggaattggatttgggggtatacgatgaatggaagtatatctggcagaaaagagcagtgatattcagaagatggagtttgtcggaggtttttgatttggaaaatagtcagaagccttcggcaggcagcacggagagagggttattttggacggaggttcacagtgtgctgcaggatgatttatacccggaagaaccgcgatgggaattggcggtctatgatagaattctgggaatgatggtggaaagggccgtctatgatatgcagtcagagaatgtttctgaggaagagatagaggcagttttgacagagataaacaggcggttggcagaggatgatggcagtgccagacagaatgagaaagagattatattggagaaagaggcaatgctgcgtaagaggatgcaaatggctgcagaagtgcggcagtgaatggatgggggaagaatgaatgagaagaaggatgattgtgctgcttgtagttatgctggtatcaggcgttttgatgggaatgtcaggcccagaggatactggattgaagttatccgtgaaaaaggtgtcaaaggccgatgagggccgtgagatttatacaggacaggagagcgtttcacttgttttggcatggaatgagcatgcagagggaactgcggcatcagatgtacaatggatcatgtgtcggggcagagatcatttaggctatcagaaagaagaaaagcgtcagacagaaggaagggggactatgacttatgtgcctgatttgtcagtttttgcagacggagaagtaactttttcattttgggcggtagatcaggccggcaatacgggagaagaagcgcagatcgtactgatgaaagacagcacatgtccggtgattaccgggcgattggatacgaaagggcggagagtgggagatttttattcggacagctgtcaggtatccatctttgtgcaggatgagaacttcgatttttcatataggccgagtgtgcagacagagaatgaggatggctattcattttcagggtggcgcagaaatggtgacaaggcagagggtgtgatgacatttgatggggaaggcacttaccggctgacattttcatgcagagatctggcaggtaatgaagctgaaacactggttgtgccggaatttaccattgaccggacggcaccggaagtttctgtgaagttcaatgaatcagacagtcatcatgaaacttattacaatcaggtaagaaaggcattgatcacagtgaatgagcagtggtttcggccggaagatggtaggataacagttgtctccggcggcgaagaaaaaaaggtgacagagattgattgggtgaagacagatcaggggtatcagtcggaaatcctctttgaaagggatggcatgaatgctttaaccatagagtggtcagatcccgcgggcaatcaggcgaagcgttatcaatctggggcatttgtcctcgacaccgtgaagccggaattgtccattaagggtgtggaagcctattcatcgaataatggaaaagtggagccggtgatagatatttatgatgttaatcttgatgaaggggaggtgacagttgcattagatgaattaacaggcaagaaggtggagatgccggaggtagaaaggcaggaaacagatacgcatcatctgcagcttgcaatgggagatttcggtagtgagatggacggtatttacagattatctgttcatgcagccgatctggcaggaaatgatgatgaggcagagctgttttttacggttaatcgcaatggctcatattatgcctttgatcagaagacagaagctatggtacaaaaggtttttatcagcagtccggagaaagtcgttatttatgagaacaatatggactggctgacggactcaagcgtgatcctcagctgtaatggcagtctgcgtgagctgaagccggagaaggactatacaattgaggcggttggcaatgaaacgtcaagaaagcaatatacttatacaattgatgagaaatgtttcagccgtgagggaacgtattcactttatttggattcgaaagacagagcaagtaattactcatcagcagaacagcaggcgcagaccatcggttttattgtcgatcgaacagcacctcgaatttcgataattaatctggaagagcagcagtattatcatggaacatctcataattttcaggtgacggttgatgataatacacagctttcctgtgtgaaatattatcttgacggcaggctggaagaacagttttcgaaagatgagattgaagaagcggagagactgcttgaattgcagacgggagcttcagatgagtatcagacgattcgcattgttgcagaagataaggcaggcaatactgcggattcgggagagtggcatgtgctggtgaatacatcggatcgaaccaggaaattcaagaagcatacagaacaatccaggacgcagtggcgtcagaattccgcagaaccggagaaacagcaggacaatgacaggcaggaggtcggattgattgccggtattgtatgtgtgatacttgtcggaggagtggtatggtatcgacatgaacagaaaaagaaagtcagtatcaggcgattgcccgatactgacgatagaaaataagaccggaggtgacagctgtgatgacttccgtgatccagaaagcatgccatacaccgttgacaccgaagaaatgactgaagataaaagccagaggaagaatcaggacaatatatcgcatacaggagataagtaatgagtgtatgccctttcccatggcttccagagcacctgcagtgacgacggatactccggatacagcgaatccaatgcagataatgcggagtgcctggcggcctgcgacaatcgtttctgtattatcgctgaacagatgaatcagctgatccggaacggccagacataaaacggttccagccagaagaatcaatataatgatatacaatgcagtctgatagatgcttctgacacgggatgattcacgcgcaccgtaattataactcataattggacgcatgccctgaatcataccattagcaggaagatacaggaaactttgcagtttatagtagataccaagaacaagcacttgtgtatctgagaatgtgccaaggagaatattcaatgcagagatcaggaatgaaggcagagccatattcaaagtagcgggaatgccaataccgtataatcgtctgcagatatttttgtccggtttgaagtattgcattttaaactgaagatttaatggttttatgcggctggtcagcaggtagatgcataaaccggtggtctggccgataccggttgccagcgcagcaccgcggatccccatttcaggaaatgggccaatgccgaagattagcagcgggtcgaggataatattgatcatacagctgcttccaaggctgatcatagatgttttcatacgccccacggactgaaagatcttttcaaaagacagttctgttgagtggatcatcgaaaagcaaaggacgataataccatactgcataccataagcgatgactgtttcgttggaagtaaacatattcaggaatggccgcataaagagaatgccgaaaaccatgaacactaggccgtggcagagattcaggagaattccctgggatgcggcagatgacgctgcgtcgcctttgcggctcccgagaaagatggcaatgacagcattggtaccgacgccgaaaccaactgcgatagaatgcagaagattctggacagggtagacaagggaaatagccatcattgcatcttcgctcatgcgtgcaacgaaaataccgtcaacaatattatagagggaattgatgagcatggaaagcatcatagggatacccatactcagcagcagtgacagaacaggtttttctttcatataagaagtatcggctgcagacatattgaactcctttctgagtgtggtgtacagcagtgattgaatcagtggaaaactgctctgaaaatagctgctgtggttgataagtggtaaaaaaaaggaccaaagatcaccagtttgtaaatcagaaactcggaaaatctatagtcctatacgacaaatattcagttaatttgctcgctgtgaatgcgagactcgttaagttatatcattaaaaagctgcaatgtcaagtagcttcgttgaaattcatgaagaaattattgggagttaagtctttgaagaagaattaaaattagttttatttttaatttgttttgtaagcgggcaataatgtgataaactataagaagcctatttattcagaaaggtagaggtttattatagatgaagacattggtaattgcagaaaaaccttccgtaggacgggatattgccagagtattgcaatgtacaagaaatagtcagggggcgcttgaaggtgagaagtatattgtgacctgggctctggggcatcttgtaaccctggcagatccggaaggatatgatgcgaagtataagtcatggaggatcgaagatcttccgatgatgccacagcattttaagcttgttgtgattaagcagacacacagacaatttcagattgtgaagaatcagctgctgcgcaaagacgtggggacaattgtcattgcaacagatgccggcagggaaggtgagctggtagcccgatggattttgaaaattgccggcaataagaagccggtcaagcgtctttggatttcttcggtaacggataaagcgatttgtgaaggctttaagaaattgaaggatggcagggcttatctgaatttgtatgcggcagcagaggccagggcggaagcagactggctggtgggaatgaatggaacaagggcattgacatgtcgttacaatgcacagctttcctgtggccgcgttcagacaccgacattggcattgatcgcatccagagagcaggagatcaaatcctttgtgcctaagaaatactatacactgacaacagtgagtcatggtatgacatggaactggcaggatggaaagagcggcagcaatcgctcttttgatagaggtcgtatacagtcgattgctgaaaaagcggaaaaagatgaaatggtgatcacggatgtgcagcggacggttaagaagagctattcaccggggctgtatgatctgacagaactgcagagagatgcgaataagcgttttggctattcggcaaaagaaacgttaaacattatgcagcggctgtatgagaatcacaaggttctgacgtatccgagaacagattcccgatatataggcaaggatgtggcagaaactttgaaagagagactgcaggcctgtgccgtcggaccgtataggaaggtggctgggaaattgcttctgcagccgatcaggatggacaagcgttttgtggatgacagcaaagtttcagatcaccatgcgattattccgacggagcagtttgtacagttagatcatatgtcttcggaggaacgaaagatttatgatcttgttgtgaggcgtttcctggcggtgctttatccgccgtgtgagtatgagcagattaagctgacaggcagctgtgccggagagaagtggacggccggtagccggatgatgaaagaagccggatggcagcaggcttatgagtcagaatgggaagaagaggatgacgatttgcttatgactgtgacaagtatgccaaaacttgaaaagggcagaaaagatacagtgatgcgcccgaaggcgagtgaaggccagacaaaaccccctgcttattataatgagggaacactgctgacagcaatggagaaaggaaatctcggaacagttgcaacgagagcggatatcattgacaagctatttaacagttttctgatggagaaaaaggataaggatatccgagtgacttccaagggacgtcagctgctggggcttgtaccggaggatttgaagaaaccggaattgacagcggactgggaggaaaagctgttggctatttcagaggggcgcttgaagaaagatgtctttatttctgaaatccgaggttacacagaagagattgtcaaggagattgccggtggagaggggcagtttcgacatgagaacctgacgaatcatctgtgtccgaattgcggcaagcggatgttgtctgtacagggaaaaaacagcaaaatgcttgtctgccaggacagaagttgcggatacagggagagtattgcaagaaagactaatgccagatgcccgaaatgccacaagaagatggaaatgtacggcaagggcgatgcgcagacttttgtatgtacttgcggttataaggaaaagctgtctgcttttcagaaccggcggaagaaagagggggccggtgtcagcaagcgagatattcagcagtatatgaagcggcagcagaaagaggcgaatgaaccgattaacaatgcatttgcagcagcatttgccaaattgaatttagaaacgaaagagggagaataatgaattttgtatttgtatcaccacagtttccaacatcttactggaatttttgcgatcgattaaaacagagaggtgttaccgtcctgggactcagtgatgcgccttatgattctctgccggagcaggtcaagaacagtctaacggagtattaccgcgtagacagcatggaagattatgaccagatggtgcgtgcactgggatattttacgcatcagtatggtaagattgattggttggagagtaataatgaatactggctgacgcaggatgccagactgcgcacggattttaatatcacaacaggcatgaagagtgatcaggtagcgaatgtcagaagaaagtcggcaatgaaagccttttacaagaaggccggtgtaccgacggcgagatatcacatggtttcttctctggaggaaggtcttgcgtttgcggagaaagtcgggtatccggtatttgttaaacctgacgctggtatgggggcagaggaaagctataagctgtccaatccggatgaaatgcgttatttctatgagacaaagtcggatgttgattatattatggaggaattcattacaggtgatatctggtcttatgatggtatttcagacagcaaaggtgacattatttttgagacaaccgtatcatggccaagaagcgtagcggatattgtcaataacaaagatcatctgtcttactatacggccaatatgctgccggaagatctgagaagggccggaagggcaactgttaaggcttttgatgtgagaagccgtttcttccacctggaatttttcagacttctggatgataaagagggactgggccaaaagggagatattgttgctctggaagtgaatatgcgtccggcgggcggatggacaccggatatgtataattatgccaatagcgtggatgtgtacagtatctgggcagatatggtggtctatgacaaaacatatgttgatctgaaccaaagaaaatattttgccgtttatgcaggacgcagaaatggaaagaattatattcatacacctgaagaaatccgggaacgctatcatgatcagattatgatggatgaagatattccggagattatttccggggcaatgggcgatcatatgtggactgcaagactggacacagaggaacaaaaggacgaatttattgactttgtacaggctacatggcagtagaagggaaggacagatatgccttttatacggacaacgacgaatgtgaacctggcagtggatcaggaaaagcgccttagaacaggaacagcagagcttgtcagagatattttgaataaggacccgatcagaatgatgacagcctatgagggaaatattcatctttgccgcggcggcgatgacaggcggaatgtgccgacagcatttgtagagtgtaagttttttggcggcggcggatatgaggtgtttgaggcctttgacaaggcgatgcatgaactttacagaaatgtattgtctattcagccgcaggatttgtatatcaagtacgaggttatttatggctgggatgaaccggcaaagatttttaaaatataattaaggacaacaatacgaaaagagtgatgcaatgcttgacattaatgtgaaagatgtgagcctggttcttgagggcggaacatttagaacggtatttacaatgggcatcctggacgcttttttggatgaaggcatcatgatgccgcatatcagcggggtatcagcaggcattacttatgccggatcttatatttctcagcaaaaagggagaaatattcatatattaaaaaaataccgtcatgataaaagatatatgggagtccgaaacttcctgacagacagaagtattttcggtttgaaatttgcttatgataccctggttaatgaattggagcctatggattgggagattttcagggcttataagggaacgatggctgtcggtgtgaccaatgctcggacgggtcagattaactatatggatggtttgaggatggataagagctgccgaatgttgcaggcaacttgtgcaatcccgctgctctttccggcaatagagatggatggacagtattattatgacggcggtgtatgtgaaccgattacgatacataaggcagaggcggatggctatcgcagacatattattattttgaccagagataaaacatacgttaaagaaaagagtcaatccaatgaatttgccgcgaaggtgctgaagcgccgtttcccgaatatggtaagaccgctgcttgaaagacatgattattataatgaggaagtagcttattgcaatgaattggaagcgaaagggcaggcattattgtttcgcccggattacccattagtcagcatggaaaagaatatcgataagcttcaggaaggctatgatatgggatatcgacaggcaatggcacgcatggtggagattaaggctttttgcggattaaattagaagcatcagtattttactgcatttcataaaagcagtgaggcataacagggaggatcaaagcgtatgagagtcggattaatttcggatttacatattgatatcaataaggattatccgattgtggaactaacggcagaaaccgctgcggaacaaatgacagacgtattggtgatcgccggcgatatcagtgagacacagaaccagacattgcaggcgatagagcgactgcagtcattatgtgagttccctgtttattatgtgccgggcaaccatgatatgtggaacaagaactgccctgagtgtacaacggaagaaattgatcgcatttatagagaggatctgcgatgcttatcaggtaagccggttattctggagaaggatggcaggcaactggctctggtgggtgatgtgggctggtatgattattccatggcatcaccggaatattcaagagatgttctggatggtatgatgatggacgggagaacatggcaggataaattgtacaatcagtggacggaggacaatcagaagcagatgttccgatgcctgaaacagttggagaaacagttgaaggattgcggcaatctgccggttcttgcagtcacacatatgctgccggtaaaggatttctgcgttcctgagaagccggatggcatcaaatgggggttctttaatgcttttcttggcagtacggcactggaggaactctacaaaaagtatcctgtgagatatgcagtctgcggtcatgtgcattatcgaagtaccgtggagagagatggtatcagacatatttgtccatgtttgggatatcatacggaatggccgctgtatcatctggcagatgaacgtgcacaaacgcatatcagagatgcactgtatattcttgaaacaccatagatagcggatcagagagtgtagcagatacataaagacaaaagaggaggagatagattggacattatcagcagaaaagaaatactgcagcatgtggatcatacattacttgcacccactgcaacatgggaagaactgcagatattgtgtgatgaggcaatcaagtacgagacggcttcagtgtgtgtgccgccgaacagagttaagcaggtcaaagattacctttgcgggcgtatggcagtttgtacggttgtcggatttccgaatggctatcacacaacggcggtcaaagcgatggaaacagaagaagtattggatcgtggtgccgatgaggtggatatggtcatcaatctgggctgggtcaaagaaaaaagatttcatgatgtccagacagagattcatacactgaaggatatttgtgatgataagattctgaaggttattgttgagacttgttttctgactgaggaagagaagataaaaatgtgtgaagtggtgaccgaggccggtgcggatttcatcaaaacatctaccggctttggaagcggcggtgcaacttttgaggatgtggcgctctttgccgcacatgttggagaaaatgtcaggatcaaggcagccggcggtattggcagttttgaggatgcaaagcatttccttgagcttggtgcatcaagactcgggacaagcaggctgattaaaattatggaactaggtcagtaacgcatagaggtcctggagatgtacgctttgtatgcaggattgagatatatgcagaaagaaaaatataaaaccggacaatagctgtcgattgacagctgttttgtccggttttgtcaacaaccgatatcggcgatgggaattagtccagatacgcttttaataattcaaaagtattgcgcacaccttcaatgtgtgaacgttcataaccatgggaagcatagacacccgcaccgatcagggcatggcggatatcatagcctgcgtcaagggcagcgtctgcgtctgaaccgtaatgaggatagatatcaatcgcaaagtcaatgccctgttcttctgctgcggctaccagtgcagatacggttgcgtagtggtacggaccgtggctgtctttggcacagattgatacctgacgttccgtacagttgaggccttcacctacacagcccatatcgacagccagtacttcactgacaggcgccggcaggtaagagcagccgtggccgacttcttcaaaaacagaaatatgctggtaaatacggcgctcagggacgatgtcctgttcctgaagatagttggcatatcccatgagaatggcaacactcagcttatcatcaagaaaacgactcttgatatagccggaatcggtaatacgtgttcgcggatcgaagcagacaatatcaccggttcggatgccgagggcttcaacgccttctttgttgtagacatcctcatccaggacaacttccattgtatcgaaggatcgctttgtatcattgtattcgccgttgacatggatagaggcatcgatcagctggaaagttccatcatagattctgccgctgcgggtatagatacggcaattttcaccctctgtattgttgggatttaatccgccaagaggcgtcagcttcagacggccgttacttttgacggtgtgaaccattgcaccaagggtatccatgtgggcggtcaggagaatggcatcctcttcgttcttgccgcccagatcgatgaagataccgcctttagctgtttgtaccggtgcatagcccattttcttgtagacattcatgacgtgttcagctgcatattccgtaaagccggtaggactgtcgatggcagtcagaccttttaactgttctaagataaaatctatttcgttcataatcaacctccagattgtttttttccattatagcatatatttctcataaaaagaaaaccagtatacgtttcagaacaaaatatgatataatgagcgttagtgagcgggagcaagcaatgcttgctcatcgcgaacggcgaatggcgatcatgatagctgcgtacgcagcgtcaagcaccaaaggtgcgaatcatgatataatgattttgttttgtagaatacgccgcagggacagaatagtgtatattttgaaaaccggcgctgccgcagatagaaaatacagtatatttttgaaggcggcttttaagaattacaataatttatgtaactgttcagaactaacatccaaaatgctacgcatttcgtcggtgtggcgtatccgccaaataaaatttcaaaacaggcttaaaaatgcaagcattttatacctgtttttgaaattttgcttggctctgaacagttacaaatttataatgaaagaagataagaaacatgcatgtaaaaattggaagaaatgatccgtgttggtgcggaagtatgaaaaagtacaaaaactgccatcagagttttgatgagaagattgaggagttgagatcacaggggcatattgtgccggatcattccctgatcaagacaccggaacagattgccggtatcaaggagagtgcaaagattaacatcgcggtactggatgaagtagcttctaagattaaggaaggcatgacaacagaggagattgacaagattgtctatgacacaacaacgaaaatgggcggtatcccggcacctctgaattatgagggtttcccaaagagtgtgtgcacatccatcaatgaagaagtgtgccatggcattccttctccgaaggtggttctcaaagacggcgatatcatcaatgtagatgtgtcaactatttacaagggatattattctgattcatccagaatgttctgcatcggtaatgtttctgacgagaagagaaaactggttcaggtagttaaggagtgtgtcgagctgggacttgagcaggtgaagccgtggggttttttgggcgatatgagtcaggctgtttatgatcatgcagtggccaatggctatcaggttgtaaggaatatcggcggacacggtgtgggcctggaatttcatgaagatccatgggttggctatatttataaaaagggcacacagatggtgatggcaccgggtatgatgtttaccattgaaccgatggtcaatatgggtacgcataagatcagtgtggacaagaaaaacggctggacagtttataccaatgataaaaagccttcagctcagtgggaaatccaggttcttgtcacagaagatggacatgagatcattgcttattaatgatgggagtgatgctgaatgctgtggattttgattgcagctgctgtatgtgcgggcgatctgcttgttaagcactatattgatacacacaaagaggagaattgtcatgaaccggtggtcggcgggcatattatcattacgcgctttcataatccgggggcaatgcttggatggatgaaagacaagccaaagatgctgatgggggtgacaattctcggtattggtgtgctggccggcggattgatgggatcgctttataagaaaaagtctgtattgatcagactcggtctggctctattgcttggcggtgcagccagtaatgcgtatgatcggataatgaagaaagaagttacagactatttcagaatcagcattggatcgaagcggttggagcggattatcttcaatatcggagatatggctatttttattggcggtattttgacggcaattggtgagatcaaagagagcttctgatgcagtattagttggatgccgtatgccttttgtggaaatgtgaatagatatgacagaaaaaggacctttgggatagggactgtctatagacggttcctactcaaaggtccttaatttacgcggattaattattcagcatcagcaggtgattcagcttcagcttcggcctgaaggatgtcttcatacttcagagcggcttcaataaagcccttgaacagcggatgcggtttattcggacgggatttgaattctggatgtgcctgagtggcaataaaccatggatgatcctttaattcaatcatttcaacgatacggccatcaggggaaataccgcagagcttcataccgttttctgtgagaacatcacggtattcattgttgacttcataacgatgtctgtgacgttcttcgatgactttctcgccgtaaagcgcataggctttggagttttcatcaaggacgcatttgtatgcaccgagacgaagggtaccgccgagatctgtcacattgtgctgatcaggcataatatggatgacaggatgcgttgtgttcggattcagctcggaactgtgtgcatctgtataacccagtacatggcgggcaaactcaacgattgccatctgcataccaaggcagagaccaaggaatggtacattgtgtgtacgggcgtattcaatagcggtgatcttgccttcgatacctctgtcaccaaaaccgccgggaacgagaataccatcggcatctttgagaatatcggcaacattgaatgaacttaccagctcggaatctacccactggatctctacttctgcgccgttggcacatgcagcatgcttcagggattcaacaacactgatgtaggcatcatgcagctggacatacttgccgaccagggcgatgcgtacttttcttgtagggttcttccatgcatggatcattgctttccagtcatcaagatccggttcaggacagtcaataccgagacgtttgcagacaacctgtgccagtttttctttctcgagggccagaggtgcttcataaagtacatccacatccagattctcgataacattgtgaacatccacgttgcagaaaagagaaatcttgtctttgatgccttcatccagaggcagttcggaacggcagacaatgacatccggctgaaggccgagagcctgaagatccttgacagtattctgtgtcggttttgtcttcatttcaccggaggatttgatatatggaatcagggtaacatgaatcagcatgcagttctcgcggccgatttcatgctggaactgacggatagattccagaaatggctgactttcgatatctccgacagtaccgccaacttcaatgatagcgatttcggtttcacgggaagcagggttccgataaaaacggctcttaatggcattggtgatatgaggaataacctgaacagtactgccgccgtaatcaccacgtcgttcgccggaaaggacatcccaataaaccttgccgcttgttacgttggagcggctgttgagggaacagtcgataaaacgttcataatgtccgagatccaggtctgtttcggtaccatcatcagtgacgaaaacttctccgtgctgatatggattcattgtaccagggtcaatattcaggtatggatcgaatttctgcatggtgacaaagtaaccgcgagatttcagaagtcttccgagagaagcggctgtgatacccttacctaaaccggatacgacaccacctgtgacaaatacgtattttactgccataatgagcctccttaatatatgaaaaataaaatataaagtttacaatctgaaaaatacagacaataaataactaaaatattatagcgcacctttccttaagaatctacaaatttttgaaaaaaatttaactggaaaaaactgtaaaatttcactatggcaaagctgcggaaaaagtaaagaatttgttaaaagttttgtttactattgatttgatttgaatatttacttataatatagaagtgcatcccgtgaaacagggcgggaaatacataggatatgaataagcctataggcaggaggatatatggataatcagaaaatgaacaacaatcgtccgaatcaggatccggaaggcggcaataataagaaggatgacatgaacaagaagagtcttcttgtcatggttgttcttgcaattgcagtgatgattattgcccagatgctgtccggcaagattgcatccgcttcccagaaggaagtgacatatacagaatttatgcaggatgtcaaggatggaaaggtgacgaaggtggaactggattcggaccgcatttattatgaggtgaagaaccagaagaatgtcaagtattatacaggcaatgttcaggatgaacgtctctatgaggaactggacaatgcaggtgttacctattcacgtaaggtcattgatacgacaacgtatgtgatgagcagcattttgtcctttgtattgccgacggtactgatggttgcagtgatgatgatcttctaccgttttgcattcaaaggcggcggtggtgtgatgggcgtcggcaagagcaatgccaagctttatgtgcaggacaagacaggtgttacattccaggatgtggcaggtcaggaagaatccaaggaatctctgagagagattgtggattttcttcataatccggagaaatatacgaagatcggtgcgaagctgccaaagggcgcgctgcttgtgggacctccgggaacaggtaagacattgttggccaaagcggtggcaggcgaggccggtgtaccgtttttcagcttatcaggttcggattttgttgagatgtttgtcggtgtaggtgcttccagagtcagagatctgtttaagcaggcacagcagaatgcaccgtgtattattttcatcgatgagttggatgccatcggcaagagccgtgactccagattcggcggcaatgatgaacgtgagcagacattgaaccagttactggcagagatggatggttttgattcatccaagggaattatcattcttgcggcaacgaaccgcccggagatccttgataaggcacttctcagaccgggacgttttgaccgccgtattatcgtagagcgtccggatctcaaagggcgtattgatgttctgaaggtgcatgcgaagaatgtctgtatggatgaaaccgttgattttaaagagattgcattggcaacaagcggagccgttggctctgacctggccaatattatcaatgaagcagcactgttggctgttcgtaatggacgtaatgcagtatctcagtcggatctttttgaatccgtggaagtggttattgccggcaaggccaaaaaggaccgtgtactcagtgccgaagaacgcagaattgtttcttatcatgaagtcggacatgcactggtggctgcccttcagaagaacacagagccggtacagaaaatcacgatcatcccgcgtacaatgggtgcattgggatatgtgatgcaggtaccggaggaagaaaaatatctgatgtctgagaagcagattcgtgaggaactggtgacaatgctggcaggtcgtgcggcagagagcattgtatttgacagtgtgacaacaggtgcatccaatgatatcgagcaggcaacgaagctggcacgcgccatgatcacccagtatggtatgtccgagaaattcggcctgattggtctgacaactgttgaagatcagtatctgggaggacgtgcgacccttaactgcggcgaagccacagcagcggagatcgatcaggaagtcatgaagatcctgaaggctgcttatgaccaggcgctggcgcttctggctgacaacagagattgcctggacaagattgcagcgttcctgattgagcgtgagacaatcaccggcaaggaatttatgaagattttccgtgaagttaaaggcatcccggattcggaaaccgagcaggcagaagcaaatgtttcaaatccggcaaagaatgattctcaaccggatggacaggatgaaccgactttagttgaagcaaaaacagacaatggggcatcatcagaatccgacatcaacgtctccttagagacaaaagcagaagattaagcaatcaatatcagtaatagtagtataaaagggttgctgcaaaatacagacagagaaaacatgtttgtgttaagcagcagcctttttacatgaaatatataaattcgtgctgtcaatactttgtgtggaggaagaaaacaatgtttgatattcaggaagaattgaagaagctgccggcaaaaccgggcgtctacattatgcatgatgtccatgatgatattatctatgtgggcaaggccattatcctgaagaatcgtgttcggcagtattttcagagcagcagaaatcatacaccgaagattcgtcagatggtcagccatgtggctcgatttgaatatataattacagattcggaactggaagcccttgtactggagtgtaatctgatcaaggaacacaggccgaaatacaatacaatgctgaaggatgataagacctatccgtatatcaaggtgacggtgggagaggcttttccgagaattatgttggtccgttccatgaagaaggataaagccaaatattttgggccgtatacaagttcacagtctgtccgggatattatcgacctgtctcagaaaatttacaaaatccgcagctgcaatcggagtctgccgaaggagacaggcaatgacaggccttgcctttattatcatatgggacagtgtcaggcaccatgccagggctatatttcccaggaagagtatcatgaaaatgttcgccagatgctgcattttctcgggggcaattttgaaccggtcattcagatgctgacggataaaatgtacgcggcttcagaaaagatggattttgaaaaggcagcttcatacagggatctgttaaacagcgtgaaacagattgatcagaaacagaagattaccagttcagagatggatgacaaggatgtcattgcttttgcaagagataaggatgaggctgtggttcaggtcttttttgttcgtcatggccgcctgatcggccgtgaacacttctatgtgtccggtgtggccaatgatacggaaagccaggtgctgactgcatttgtcaagcagtactatgcttcatcccctttcgttccgtctacattaatgctgcagtatcccttagatgacagggaggttattctggaatggctgtcagggcgcaaagggcacaaggtgcgtgaagtggtgccgcagcgcggacagaaagagcgtctggtggagctggcggctgagaatgcgagaaacgtactgacaaaggacagagagaaaatacgactggaagaggcaagaacaaccggtgctgtgcgggatctggcagagatgctcggtcttccggcaggtatccgaaggatggaagcttttgatatttccaatatcagcggtgtagagactgttggctccatgatcgtatatgaaaacggcaagccgaagcgaaatgcttaccgcaagttcaaaatccggacagtcaaaggacaggacgattaccgctgtatggaagaggttttgacaaggcgttttcagcatggactggaagagactgtgagcggggaagaaggaaagttttcggatttcccggatgtattgatgatggatggcggcaaagggcaggtcaatgtggctttaaaagtgctcaatcagctgcatctgaagattcctgtctgtggtatggtcaaggatgatcaccatcggacacgaggcctttattatcagcaggtggaacttcccatcgacacgcattctgaaatgttcaaattaattacaagaatgcaggatgaagcacatcgttttgccatagaatatcacagacagttaagaagcaagacccaggtacgttcagtgctggatgagattccgggcatcggaccggccagaagaaaggcactgatgaagtatttcggcagtatagagaaaatacgtgaggcggatgaggaagaactgatgaaagccgaaagtatgaatgcgggaagtgccagagcagtttatgcgtattttcattgatgaaaatataaagatatgttaaaatgaagcgaagattgaaaagagacggtcatttggacaggagtggagagatagaatgtacaataccagcaaaggaaattacagtgtaaaactgaacaaagtcattgagaagtttaatttgaagaatctgacacctgaagtggatacaaagaagatcgtgatcagacagacagatgtcaatcgtccggccctgcagtttgcgggttactttgaatattttgactacagccgcattcagctgatcggcaaggtagagtattcttatctgaagatgcatgatgatgattatatccgtgagatgacagagaagattttcaaagcaggtatcccatgtatgattttctgccgtggacttgagccgcgtccgctttttatggagctgggcaataaatacggggttcccgtgctggctacagatgacggcacatcatcctttttctcagaattgaaccgtttcctgaagatagagctggcaccgagaatttccatccatggagttttagtggatgtgtttggtgagggggttctgattaccggtgaaagcggtatcggtaagagtgaggcagcgctggaactggttaagcgtggtcatcgtcttgtatccgatgatgttgttgagatcaagaagacgaataacgatgagctgattggcacagcaccggacatcacaagatattttattgaactgcgcggtatcggtattattgatgttaagacgctgtacggtgttcagagcgttgaagaaagccagagcatcagtttgatcatcaaactggaagagtgggatcgtgagcgtgaatatgaccgactgggtctagaggaacagtatgaagaaatccttggcaataaagttgtctgccattcgattccaatccgtccggggcgtaatctggctatcatcgtagaaacagcagccatcaaccacagacagaaacagatgggttataatgcagcacatgaattgtatcgccgtgtgacgggcaaccttcagaagaaacgtgaggaagactaatggatcaattttgttttggtgtggatctcggcggtaccactgtcaagatcggtttatttacagtagacggaatgcttcaggagaaatgggagattccgacaagaacagagaatcagggcgctgctattctcagtgatattgcagcatccatacagaataaggtggatgtacgtcatctgacgaaggaacaggtgacaggcatcggtattggcgtgccgggcccggttctgaatgagaatagggttcagggctgcgtgaacctcggatgggggaatgtctgcgtagcagacgaattatcagcattgacaggaatgaaggtcaaagctgcgaacgatgccaatgtagcagcccttggagaacagtggcagggcggcggcaaaggctatcagaatattgtgatgttcacactgggaacgggtgtcggcggcggcattatccagaatggccagattgtatcaggcgccaatggtgcagccggtgagatcggacatatggtgatcacagaaccggagaatgttgtgggaacctgcggatgcggccatcagggctgccttgaacagatcgcttctgcgacaggcattgtcaatctggcaaagagacaattgacagagtgtgatgaagcaagtattttgagacagtatgccccgctgacagccaaggatgtcttggatgcagctaaggcaggagatgcccttgcatgccgggtggcagagcagatgatgcaggctctgggccgtgcggcagcttatattgcctgtgtcatgaatccagatgtatttgttattggcggcggtgtatcaagggccggtgaatatttgacggaaggcattcggcgttattatcagcagtatgcgtttcatgcatctgcagagacgccgtttgtgttggcatcattgggcaatgatgcggggatgaccggtgcagcaggcatggtctgcaatttttagaatgaatcatgatcaatcgattgaaataaaaggataagaggtttatatggatttttatcatagattattggaggcagcaggctcagaccacgttttgagagatgagcctatggctgtgcataccacattccgcattggtggtccggcagattattttgttgaaccggcggatgcatctgccctggcaaagggaatcgctttgtgccgtgaagtggatgtggactactttgtgacaggcaacggcagcaatcttctggtgggagacggtggctacagaggtgtgatctttcatatttgccatacaatggatcatatacagtatgaagagcaggaaggagaattactggttgaggcaggggcaggcgtgatgctttccaagctggcacgtcaggtttcttctatgggatatactgggtttgaatacgctaccggcatacccggaacacttggcggcggtgttaccatgaatgcaggtgcctatggcggagaaatcagcgacaatatattgtgggctgaactgatggatgaaaccggtgccattctgaaattggagaaggaacatctgaaactttcttatcggcacagtgtgatgatggagcatccgttagttgttctgagagcagctttttcctttaagaaaggtgatgctgcggccatttcagacagagtcacggaactgtcacgcttaagaagagagaagcagccgttggaatatccgagtgcaggcagcacatttaaacggccggagggctattttgccggcaagctgatccaggactgcggtttaaaaggctttcgtgtcggcgatgcggttgtatctgagaagcacagtggttttgttatcaatgcagggcaggcaacggcggcagatgtgatggcattgatccgttatgtccaacaggaagtggaagagaaattccatgtcaggatagagccggaagtcagactgttgggagagttttaaccgaggtgataagatgcgttttgtaattgtaacgggaatgtcgggagctggaaagagttcagtattgaagatgcttgaagatgccgggtacttttgtgtggataaccttccggtgccgttggtcttgaagtttgcggagatcagctggcatgaggagaatatgatgtcgaaagtggcactgggcattgatatccgaagcagaaatcatctgaatatgttggaggatgttctgaaatcggtgcgtgatgaaggctatgattatgaaatcctttttatggactgcaaagatgacaaactgattaagcgctataaagagacaagaagaaatcatccgttggctgcaggcggaagaatcgagacagccattgctgaggagagacagcgcttaagtttcctgaagaaacagtccgattacatcattgatacaagtaaccttctgattcgcgatctgaaaaaggaaattcagcatattttcgttgaggataaggattacagcaatttctatattacattgctgtcatttggattcaaatacggcattccggcggatgcggatcttgtgttcgatgtacgcttcctgccgaatccttactatgtggatgaattgaagcatcagacaggcaatgacaaaccggtgtatgactatgtcatgaaatcagaagatgccggtatattcctgaaacagctgtatgatatgcttgtttttctgatcccgcgttatattgcagagggaaagaaccagcttgtggtggccatcggctgtaccggcggcaagcatcgatcggtgacaataaccaatgctttgtacgagaaaatgaaagatctggaatacagtatcaaagcagaacacagggatgtagacagagatggacagcataagagcagtcaggtgaggtaaggctatgtctttttccagcaaagtcaaagaagaactttcaaaagagtgcaatagtccgcgccattgctgcattgcggaaacggcggcaattatcagtatgtgcggcaaggtgatttttgatgaaaaagatcacgttcgaatagaaattcatacagaaaatgtaaccgttgcaagaaagtactttacattattgaaaaaaacatataatataaatacggatatctcaatccggcatagttccagtttgaataagaatcggtcctatgttttgtctgtgaatgacgatgaaacagcgagaaagatacttatgacatgcaggctgatgaagccgtttggcgtgattgaggaagatttttccatatcagacagtttgattattcagagagaatgttgcaaacgggcatttatccggggcgcatttctggcggcaggatcagtcagtgatccggtgaagacctatcattttgagattgtttgcctgagtgaggcaaaggcgaaacaactgcagatgattatggagacattcaatatcaatgcaagggtcatcaagagaagaaagtattttgttgtctatgtaaaggacagctcgcaggtcgttgatctgctgaatattatgggtgcctataatgcgttgatggatatggagaatgtgcgcattgtcaaggatatgcgcaacaacgtcaatcgtaaggttaactgtgaaacagcgaatatcaataagactgtttcagcagctgtgaaacagattgaagatatcagattcattcagatgtcgtcggcttttgacgaattaccggaatctctccaggagatggcagaattgagggttcgctatcctgaggcgacactggccgagctcggacagttgttggacacaccggttggaaagtcaggtgtcaatcaccgattgaagaagatcagtctttttgctgatgaacttcgggaacgacatcatcaataggggtattatcgaaaggcgaggtatattttatgatttcaaagaacattacaatcaatattcctacagatatggaagcgcgtcctgtggctttacttgtacaggttgcaagccagtttgaaagcaatatttacgtagaagttgaagataaaaaggtgaatgcaaagagcattatgggtatgatgacactttctattgcgccgggtgaagaagtgacgatcatcacgaaaggtgtcgatgaagaagaagcgatgaacaagatcgaagaatacctgacaacatcgaaataaacatattttattataaagatcgacaggaaagaggctgttgtaaaaccggttctcaagcacagcagtattgtgcgggtgctcgttttacagcagtcctttttcgtgtcatgaagatgagtatgaccgcgaaaaaaacagctgcttcgcggttgggtgatagactatcaggagaaaggagagtacgcatggattttacacatttgcacgttcatacagaatacagtctgttggatggctccaataaaatcaaagaactgatcgccagagtcaaggaacttggcatggacagtgtggccatcacagatcacggtgttatgtatggtgtgattgatttttataaggaagcacagaagcagggcattcatccggtcatcggctgtgaggtttatgtggcaccgggttcacgttttgacaaaagcggcaatatgagcagcaacagatatcaccatctggtattgcttgcggagaatgataccggttatcataatctgatgaaaattgtatccaaaggttttacggaaggcttttattataagccccgtgtagataaagaacttttaaaagaatatcatgaaggcatcattgctctcagtgcctgcctggccggagagattccagatgcattgagaaaaggcctgtatcaaacggctttgaatgcagcacaggaaatggcagaaattttcggtgaagatcatttttatctggaattgcaggatcatggcattccggatcagaaaacggtgaatcagggactgcttcggctggcgaaagatacaggccttgaattggtggcaaccaatgatattcattacacattggccgaagatgctcaggcgcatgacgtattgctgtgcatccagacaggcaagaaagtggcggatacggatagaatgcgttatgagggcggtcagtattatgtcaaatcaccggaagagatggcatcgctgttcccttatgcccgtgaggctatcgagaatacgcacaaaattgccatgcgatgccatgtggatatcgagttcggtcattacaaactgccggaatttcctgtgccggaagggtacgattcatgggaatatctgcagaaacttgtctgggacggtttttatgaaagatacccgcaggcggatgagaagctcaaagagcgtgtcagctatgaattaaataccatcaaaaccatgggattcgtggattatttcctgattgtatgggattttattcattatgccaaagagcatgacattatggtcggaccgggccgaggttcggcagcaggaagcattgtatcctactgtctggatattacaaccctggatccgattcgctacaatttactctttgagcgattcctgaatccgaaccgtgtgacgatgcccgatatcgacgtggatttctgttttgaaagacgacaggaagtcattgattatgttgtcagaaaatatggcaaagagcgcgtggtgcagattgttacatttggtacaatggcagcgcggggtgtgatccgtgatgtggggcgtgtcctggatctgccttatgccatctgtgatagtgtggccaagatgattccgaatgagcttggtattaccatcgataaggcgctgaagatgaatccggagctgaaaaagctctatgacggggatgacagtatccacaatttgattgatatggcaagaagactggaaggcctgccgcggcatacatccatgcatgctgccggtgttgttatcagcccgaaggctgtcgatgagtttgtaccgctgtcgagaggcgcagacgatgtgatcacgacacaatataccatgaccacgctggaagagctgggactgctgaaaatggactttctggggctgcgtacactgactgttattcagaatgcagtgaagctgatcaatgcagacggtcggcatcatgtggacatgcatgagattgattacaatgacaaggctgtttttgatatgatcggaacaggaaaaaccgacggtatttttcagcttgaaagttcgggaatgaagagcttcatgaaggaactgaaaccccataatctcgaggatatcattgcaggtatttcgctttatcgtccagggccaatggattttattccgcgttatatcaagggaaaaaacgaaccggcgtccatcacgtatgagtgtccccagctggaagagattctggaaccgacctacggctgtattgtctatcaggaacaggtcatgcagattgttatgaaactggccggttatgatctgggacgaagcgaccttgtgcgtcgagctatgtcgaagaaaaaagcggatgtgatggcgaaggaacgccagtactttgtgtacggcaatgatgaactgggtgtgcccggctgtattgccaacggtattgatgaggcgacggccaacaggatctttgatgagatgacagattttgccaagtatgccttcaataagtcccatgcagcagcctataccattgtttcttatcagacagcatggctgaaatactactatccggtagagttcatggcggctctgatgacatctgtcatcgacaattcagtgaaagttgcagaatatattatgacctgcagacagatgggtattaagatactgccgccggatattaatcatggcgtcagcagtttctctgtggacaacggcaggatcctttacggactttctgcggtcaaaagtatcggaagaccggtggtggcagccattgaacaggagagagccctggcgggaccatttacaagcctgaagaatttcattgagcgtatgagcggcaaggaagtcaataaacgttccattgagaattttatcaaggcaggtgcctttgacagctttggagccacaaggcgtcagcagatgatggtttatgcgcagattatggatcaggtggctcaggacagaaagaaaaatatcagcggtcagatgacattattcgatttcatggatgaagaagaaaaacaggcttttgagattcgttatccgaatgtgggtgagtatgacaaaggtactctcctttcctttgagaaggaagtccttggggtatatatcagcggacatccgctggatgatgtggctgagagctggcgcaggaatgtcacggcggtgacctccgatttctatgtcaatgaggaaatcggcatgccgaatgtggtcgatcagtcattggtggtcattggcggtatggtgacgggcaaaacagttaaatcaacaaagaacaacaagatgatggcttttattcagctggaggatctgctgggaacagtagaagtcattatttttccgaatgattatgagaaatatcaggctgaactgacagaggaggcgaagctttacatcaagggccgtgtgtctgcttcggaggatcagcaggcgaaactgatcgcggagaagatcattccttttgataaggtgccaaaggaagtatggctgcagtatccggacaagaacagctttatcggacagcaggaagccctgtacaaaaccctggcggggcattcgggcaatgaccgggtcatcatattctgtaaagtggaaaaagccattaagaaactgcctgtatcatggaatataaaggcagaggaagaaattcttgaccagcttggaacagtattgggaaaagaaaacgtaaaagttcgggaaactgtcttgaaaagcttctaaaactgtattaaaatatttctaatggatttgagataaaagattaagacagcgtaagtggaggaattgagcatgaatgatggtgtaaaaacaataggtgtactgacaagcggtggagatgcaccgggaatgaatgctgcagttcgagcggtcgtcagaacggcgattgcttacggctgtcaggtcaaggggattcagaagggatattcaggactgttggaggaagagatcattgatctgtatgccggcagtgtatctgatattatcaatcgcggcggtacatttttatacacagccagatgtgaggagtttcgtacagaggaaggccagagaaagggcgcagagatctgtaggaagcatggcatagacagtgttgttgttatcggcggtgacggttctttccagggcgcaagaaagctggcggctcatggtatcaataccattggtgtaccgggaaccattgatctggatattgcatgtacagactatacgattggttttgatacggcggtgaatacagcgatggaggccattgacaaggtccgcgatacatccacatcccatgagcgatgcagtattattgaagttatgggaagaaatgccggatatattgcactttggtgcggtattgccaacggtgcagaggatatcctgcttcctgaattatataattacgatgaggaagccttgattgatcatattattgccaaccgaagaaggggcaagaagcatcatattatcatcaatgcagagggtgttggccattccaccagcatggccaagcggattgaagcggccaccggcattgagacgagggcaacgatacttggacatctgcagagaggcggaagcccgactgcgaaggacagagtgatggcttccgtcatgggagcctatgctgtagacgctctgatgggcggcaagagcaatcgtgttgttgcttataaggacggcaagtatgttgattatgatattgaggaagcattggcgatgcagaaggagctggatccgttccagtacagtgtagccaagatccttgcacgctagtacattgatataattacagaacagatataactgaatcatacagagatattcaggggctgtcgtcagaaaattccgcagtggctttgagccatcgggaagaggcggcagctctttttttgaaggaggagaagatgatcacaagtgtttccaatccacagatgaaaaggattaaagagcttttgaataagagtaagcagagaagaaaggaaaagtgttttgtggcagagggcatccggatggttgcagaaactccggcggacagactggagagggtttatgtatctgagagcttttacaggcatccgccggaacttcggggactggatctttcgaaggcactgatcgtggatgatcaggtattccgacaggtttccgatacacagacacctcagggaattatggcggttgtcagacagcaggagaacagtctggacgctattatgaagcagccggacgcattgctgctgttccttgagaatatccaggatccgggtaatctcggcactatgatgcggacagcggaaggagccggcgtaacggggatcattatgagccgtgaaacgacagatatttataatccgaagaccatcagggctacaatgggttctctgtacagaatgccgtttgtctatgtggatgatttctgtgagactatccgtatggcaaaagcacagggtattcggttgtatgcggcccatttaaagggaaagcatacctatgacggagaagactacagacagccctccggatttctcatcggcaatgaaggcaatggcctgacgcaggaagcggctgacagtgccacggattacatcagaattcctatgggaggacagcttgaatcgttgaatgcagcggttgcagcggcggtgctgatgtatgaggcgaatcgccagagaagagaacaattgtaaattgttatcatttcgtaaggaaaaattcagaaaattcagatttattaacatatcaaatgtcaattgttttaaataatgaggaatgatatagacatcaaccgtaaaaaatgatatgatgaagacaactacagatatctgacgcagatgcggaatagaatgaggcaaggagggatttgcgtggaacaaatggagattatctggctggcattgatggcagttctgctgatcatagagattatgacgctggggttgacgacaatctggtttgcagcaggcgctctgtttgcatttctgacagcgttgctcggattgaatcagggaatccagattggcgtttttgtagttgtatctgttgtactgctgtttttcacaagaccatgggctgtgaagtatctgaataccagaacggtcaagacgaatacggaggccctggttggcaaatcagccagagtcattgcggatatcaataacctgaagggtgaaggtcaggttgtgatcaatggtctggaatggacagcaagaagctcggatgataccatcattttcagaacaggtgacgttgtcactgttgttggtattgaaggcgtgaaactcattgtcgaaggacagaagaaaggagactaatatgattttagtgattgtattaattattatcctgttattgatcttagcatcttgcctgaagatcgttccccaggcccatgcctatgttattgagcgtctgggtgcctatcagggaacctggtcggttggttttcatatcaagatgccgatcattgacaaagttgctaagaaagttatcctgaaggaacaggttgtagattttgcacctcagccggttattacgaaggataacgttaccatgcgtattgataccgttgtattctatcagattacagacccgaagctgtattgctatggtgttcagaatccgatcatggccattgagaatctgacagcaacaacactgcgtaatattatcggtgatctggaattggatgagacgctgacatcccgtgagatcatcaatgccaagatgcgttcaacactggatgaagccactgacccatggggcatcaaggtcaatcgtgtcgaactgaagaatattatcccgccatctgcgatccaggatgccatggagaaacagatgaaggctgaacgtgaacgtcgagaatccattctgatcgcagaaggtgagaaacgttctgcaatcctgaaggcagaaggccataaggaatctgtgatcctgcaggctgaggcagataagcaatctgcgatccttcatgcggaagctgtgaaggaagcgaagatccgtgaggcagaaggtgaagcgcaggctattttgaagattcagcaggccaatgctgatggtatcaagttcattcgcgaagccggtgcagattcagctgttctccagttaaagagtctggaagcttttgcgaaggcggctgacggtaaggccacgaagatcattattccgtcagatattcagggcattgcaggtcttgccacttctattgcggaagttgtcaaagaggcagatgccaaataacgcttagaagatatgtaaattttcatctaagatcaggcgagccgctgtgcaggttgtacagcggcttgtacttttttacaaacttataacgagaatgtttaagaaatttttcagaatttagatagacaatctttaaaaaatgggtgtatacttctgtttgtatcaagaaagaaaataatttttagtcgaccataataattataataagttgtggaggagttcctatgagaaaattgagacaatggaccttgaatcacccattgcagtttgtgagtgtttttatgcttgtttattttacgtggttttccctgttggagaagtatgcacagccggttttgatgatacattcgaagttggatgataagattccattttgtgaatactttatcgtgccgtatttgctgtggtttgtgtggatcgccggtacatttgtttatttttacataaagtcaagagatgatttttatcatgcctgtcgttatatgttcaccggtatgattgtctgcctgattatttacacactgattccgaatggattgaatctgagaccggagataaccaataacaatattttctcaagactggtagacatgatctggtctgtggatacagcaacgaatgtctgcccgtcgatccatgtgttcaacagtattgcaatcaatacggttatccagcattccaatgcctttaagcacaagaagctggttcatgtgggttcctacatactggcccttgcaatctgtatgtcaacattttttctgaaacagcattcagttgtggatgtattctgggcatgcgtacttggattgattttgtatccgctgtcatacaagtcagcttttgatgattcaagagaaagcgaatacgatgttaaagcttcataaacagattgaatggaatgtgtccatttccttacagaggggagatgcggcacattctttttattgcagctcttgataatttaatcaaaataggttaatatcgtatcatatgggttcatatggaatgaatataagcggaggtcgtgacatgaaggaaaagatattaaagtgtctcagagaggcagaggactatgtgtccggccaggagctgtgtcagatgttcgacgtgtcaagaacagccatctggaaagtgatgaatcaactgaaggaagagggctatgtcattgatgctgtgaagaataaagggtacaggctggtgcagacaccggaccttgtgacagcagaagaagtagaaagtctccttgagacatcatgggcggcacggccggttgtctatgaagaagaacaggcatcgaccaatcagacagctaagatgctggcagaacagggggcttcacatggaacacttgtggtcgctgagcgtcaggtatccggcagaggcagaagaggccgtccttggcattcgccaaagggcagcggcatctggatgagtattcttttgagaccgcagattcatccgatgtcagcgtctatgctgacactggtagcagcgatggctgtttatgatgctatcagcagccgtgtggaaggatgtgccattaaatggccgaatgatatcgtgatcgacggccgcaaggtgtgcggaatcctgacagagatgagttcagaactggacaatatccattatgttgtgatcggcatcgggatcaatgtgaatacagatgattttccagaggatattgcgtcggttgctgcatccatgcatgtgatcacaggcgcctattacaaacgggcggagattattgcagatacctggaaagcgtttgagaagtattatgatctctttgtgcagacagagaatttggcattgatggtggatgcttataatcagcgccttgtgaatatggaccgcagagtgatgattgaggaacgcggccatcggtatgaaggaactgcccgaggcattgatgcggaaggtgcgcttcttgttgagagggatgatggaacgacaacatcggtgatatcgggggaagtctcggtcagaggcgttcttgggtatgtatagttatagaatgagaaggacttgccctaagcagaaacgggcaggtatatgaaggaggaagaatatgtttcaggataaaatggtattatgtgcttcaagtgcatacgagaagaagttttatctgaatgagaattttgaagggctgccgcagcatgttaaggatgagctgaagattatgtgcgtgttgttcacggaagatgtaggcggtgtgctgtcccttgaatttgatgaaaacggcaatcttgaactcaatacatctgccgatgaaggcgatcttctttatgatgagatcggcagtgtgttgaagattaagcagatgcagcaggagaaacaggaattatttgagtcactggagacctattataaagttttctttttaggggaggatattgaagatgataatggcgattgatgtcagcaacacaaatatcacattgggtaccttcaagggagagaagcttctgaagatttatcgtgtgaccacaaaggttccgagaacatccgatgagtatggtgtgcttttgcgtgatctggttcgtttatccaatgccagtcaccatgatatagaaggcgttattatcgcttctgtcgtgccgaatgtcatgtattcgctgaccaatgcctgtatcaaatattttcatgtgcatccggttattgtgggaccgggagtgaagacaggtgtgaaagttggtgcagagaacccgaaggaagcaggttctgatctgatcgtcaatgcagcggctgtcaaggaattatacggtgtgccggccattgtcattgattacggaacagcgacttcctatcagctggttttagaggacggcaagctggattccgttgttattgcaccgggtattcagacaagtgttcaggcgctgaccagtgatgcagccagaattccggaagtggagattagaaagccgaagacaattctgacgaaggatacaacagagtgcattcaggccggaatcgtgtacggtaccattggagagacggaatacattgtccgcaagatgaaagaggaatctggtcttgagaatatcaaagtggtggcaacaggcggtttcggcaaggtgattgccgacgaaacagatgtcattgatatttatgataatatgctgacccttcaggggctgcgcattatttattataaaaatgtggctgccggaaggaagagcaggaaaatacagaactaagtcaatgatagacattgaagcaggaataaaaaggaaacattgtgcatatgatgatgaaaccattacaaattggaaatctttgcattgatcgtcccgttatactggcaccgatggcaggcgttactgacctgccatttcgtgtgctctgccgcgaacagggatgcggcatggtctgtacggagatggtcagtgcaaaagccattacttataagaacaaaaacacatttcttctgatggaaactgtgccacaggaacgcccggtgtctctgcagctgtttggttcagactcggatatcatggcggaagcggcaagaatgattgcagacagagattttgatgtgctggatgtcaatatgggatgtcctgtgccgaaagttgtcaataacggtgaagggtccgcactgatgaagcagccggagctggcaggccggatcgtcagaagtctggtggaagccattgacaagccggtgacggtcaagatcagaaaaggttttgatgatgatcatatcaatgctgtagagatggccaaaattgcggaagccaatggcgctgcggctgttgctgtccacggaagaacgagagaacagtattacagcggaaaggccgattgggagatcatccgcagggtaaaagaagccgtgaagattccggttatcggaaatggcgacatttttacccctcaggatgcaaagcggatgattgaagagaccggatgtgatgccattatggcagccagaggcgccagaggcaacccatggctgttcagagatatcattgattatctggagaagggaatccttcacgagaaaccgtcactgaaagagatgacagatatgatgctgcgtcacgcggaaatgcatatccgttacaagggagaatatcagggcatccgagagatgcgcaaacatgtggcctggtatacagccggttatcacggttccgccagaatgcgtcaggctgtgaatgaagtggaatcttatgaagctttgaaacagcttttggcagattggctggcatacagcgaaggcggtatgaaagctcatgacaaaaacaatggatcatgacgaaaaatatggcatgaatcaagggtttaagtgaaggaatcagttgacagtgaaatgtcaataagatataatacagggatgtatgctggataaaatagattgttctgcagttatactgtatggcggattgcagaagatggatccagcctgaagtatgaacattttgagaatgactgagcagttcaggtgaaagatagaataatagttatagaaaggatattttattatggctgagacaaagaagaatattatgacatttgcgggtttaagagcgttggaagatgaattatttgatctgaaggtatacaaacgtaaggaagttgcccagaagatcaaggaagcgagagaacagggcgacctttctgaaaatgctgagtacgatgcagctaaggacgagcagagagatatagaagcacgtatcgaagaactcgagaaacttctgaagaatgtagaagttgttggccaggatgaagtggatgcagatactgtcggtatcggcagccgtgtgaagttatatgacgtagagatggacgaagaagtggaatatacaatcgttggttctacagaagcagatgcattaaacggcaagatttccaatgaatcaccggtaggtgcagcacttatcggttccaaggttggcgagacaatcgttgttgagactatttccggtgacctggaattcaagatccttgagattgcaagagcttaattttcagcaatcgcaagtaatcattttttgtacttgcaaaagcttaatatggacaagggcttaattctatgagtaagcccttgaatttagtaataggaaacgcaaaaatcagttatcgaatagaacaggagagagcaaagtggcagaggcaaagaacaatcagacaccagatgtcagtgaacaggataaaatcagacgcggcaagctggctgaccttcaggcagcaggcaatgacccatttctgatcactaagtataacgtaacccatcacagcatggagattaagaacaattttgatgaacttgaaggtcaggaagtgactgtagccggccgtatgatgcagaagcgtgtcatgggtaaggcttctttctgcaatgtccgtgatctgcagggggatattcagtcctatgtagcaagagatgaactaggtacagaggcctatcaggcattcaagaagtttgatatcggtgatatcattggcatcaagggaaaagttttcaagacaaagacaggtgagatttctattcatgcaacagagatcacgctcctttccaagagtctgcatacacttcctgagaagttccatggcctgacaaacacagatattcgttatcggcagcgttatgtggatctgatcatgaatccggaagtcagagatacatttatcaaacgttcccagattcttaaggaaatccgtaacttccttgacggccgcggcttcatggaagtagagacgccgatgcttgtatccaatgcaggcggtgcagcagcaagacctttcgagacacattacaacgcgctggatgaagatgtgaagcttcgtatttctctggagctttatctgaaacgtctgatcgtcggcggtcttgaaagagtttacgaaatcggccgtgtattccgtaatgaaggtgttgatacccgtcacaatccggaatttacattgatggaattataccaggcttacacagactatgaaggcatgatggaactgacagagagtatgttccgttaccttgcagagaaagtctgcggcagcgcagtactcagctataatggcacgattattgatatgtccaagccatttgaacgtatcacaatgatggatgcagttaagaaatactcaggtgtagattttacagaagtgaagacagatgaagaagccaagaaactggctgacgagcatcatgttgcttatgaagcacgtcacaagaagggggacatcatcaatctcttcttcgaagaattctgtgaagacaagatgatccagcctacatttgtcacagatcatccgattgaaatctcaccattgactaagaagaaaccatccaatcctgaattggtagaacgtttcgagctgtatatttacggccgtgaaatgtgcaacgcttactcagagctgaatgatccgatcgatcagagagaacgtttcgctgcacaggaagaagcatttgcagccggcgatgacgaagctaaccatacagatgaagatttcctgaatgctctggaaatcggtatgccgccaacaggtggtatcggttacggtattgaccgtctggtaatgctgctgacagacagccaggctatccgtgatgtattattgttcccgacaatgaaatccttagatggtgtaaataagaaaaatgatgtaaataatacagcttctgaagcacctgaaaaaaatgtaaaaactgagtctgaaaagattgatttttctaaagtaaagattgagcctttgtttgaggaaatggtagactttgatacattcagcaagtcagatttccgtgcagtaaaggttaaagagtgtgttgcagtaccgaagtcaaagaaactgttacagtttactcttgatgacggaacaggcacagacagaaccattttaagcggtattcatagcttttatgagccggaggaactggttggaaagactcttatcgctatcacaaatcttccaccgagagcgatgatgggcattgactcttgcggtatgctcctcagtgctattcatgaagaagaaggcgaagaaaagcttcatcttctgatggtagatgaccacattccggcaggtgcaaagctctattaagatgatgtaaagatgtaccgttttaccaaatagacgggacgtacttcatttgataaaaaactaaaaaaacagcgatttacatcaaacttacatcaattgatgcagaaatcggtgcaagcaagaaaaaatcgcataattagtacaaagagtgggcaattccaatcgggattgcccatttttaaaacaaacagaaatacaaatcggaagttttaaaggaggaataccatgggattatttggtaaaagcaaaaaagaacgagaaacagaatacatgagcagattagatgttccatcgtgtttaaaagaagattttgaattgattattgatgatatatttacaattatgggagttggaacagttgccacaggaaacatattaacagggatgtgcagagaaggggaaaatgcatgtatttataaagcaaatggagatatcttagaaaccagaattactactgtcgatgtacatacaaaagaacgaaaagcaaatggttgtggatataaaacagagcatgttggacttgggttacgaggaatttccaaggaacaattagaaaagggtgataaagtacttgtaaagaatgccaatatgtatggaatgtaattacaaattgcaatttgtataactaaaatctcaactttccttattttatgcgacttggcggtatgccttgccactctatatgtatccttttcccttgtttttgcccttatgaggtatctacaagggaaagtttttcttattcgattttattctccaaccaccttatcaagtagtcgggctgagtttcgcttaccttctcggttagcgtgtgcatagacattcatagtggtacttacatccgagtgtccaagtaattcctgtacatcctttggtgctgctccatttgagagcaggtttgtggtataagtgtgtcgcagggtgtggaagtggaaattatcatcaagctccgacaatcgtttccttgctgtccttaaagctgtctcaaccgttgcaggggcttcgtatgctccgtccggtctgatacatacaaggtcaatctcgttgtaatcaagcggaatgtcctctgtgccatccaaatgataaagctcatagtagatacgattcttttccttaacttccctgtagtagttcctctgatagagttctccgtaactgaatacctgctttctctgttcctttttcgctttctttaagatgtcagcgagcgtatcacagaaatccacgatacggactttctttcgctttgtcggaccaatctcggtcttgtgccttgctccgttgtaacggacacttcttcgtactgtcagatactgttcctcaaagttaatgtcactccaagacagtccgcatacctctccaagtctaagacctgtgtagtacgctatctgtaccggcaggacagcaggcttgtttctttcttccagatactccataagcgtttgatactgctctggtgtaatcgggttgataacctctgcatcctcatcattatcagaaaacaaatccacatcttcctcggctttcctacgcattaccacatactgcattggattgaatgtgatgtactgctttggaaagactgcaaatcggaaggactgttgcaggactgcgtggaaagaacggatatagtcgatggtgtaaccctttgacttaaaatttccttcctcaccgccaaatgcaagtaaatccataaacttctgcaaatgctccgaagtgactgtctttagttttctgtttccgattgggtgttgtttaatcctgtttactgcctgtaaatagttaccgactgtaccgttgctaagtgaacccgttttcaaatcttcctctgcccatacatctagcatctgtccgagtgtgaggttgtccgctttggctagaaatttctttgcgtcataatcctccatagccttgcgtaacattttctctgtctctgatttgctctccgtacctgcaaattctttctgaaccaagttaccacttgcatcctccacataaaagcggtagtaccatttcttgcctttcttccttacagaaccttttgccataatcgtttctcctttcgatatcggcaatcggaactggtgaaatgcttcttgcgtgtaagtatatcatagctccgtctgcctatctataccgaatcgggatctttttctgataaaagattggctagtcgatttttcgctgtctcaggattcttagaatacagtcttacaatatcgcccatatcgttcaatgcgttgacggtgtgggtgatttctctaaggaacataatctcattgtattccttattggattcaaaccccattgtctgggcgagcattttgttatctgtatttcctttgaaattcttacaagcgaactggaacgaatccacgaacagctcgtattcccgtaacatcagtagtagcaggtctttggaaaaatcactttcggactgttccatatcataagggagcttattcagaatggaagtcatcacatcacgaatctgtaattctcttttatccgtaatgtctgtttcgtattcgtccgtctcacctttcagccattccacagatacatgaagtgcatctgccagaccttctaaggtcattttcttggtgttatcaatcgttcctgcttcgtatctctgaatggttgaggctgtcacgcccattttttcagcgacataaggctggttcaatcctaactcctgtctacggctttttgctctgctaccgattgtctttcgcaattctttatcttttaacatacttgcgaacctcctttttcggtatgtcattactataccacataacacgatatattgcaatacgcaattctataaaagatgatagaatttcgtaaggcttgacatagcgttataaaagatatatactttaatcagaattgcgtaacgcaagttttaaaaaaggctaatcctttcttcaaaaaggaacatcctctgatatacaagacttgtaatcctacgcaggaatgaggtgatcgaatgacagaattaaagtttgctctctccattgaagaagctgccgactatacaggtatcggaagaaacactcttagaaatcttgtggaatgggaaaagctgcctatccttagagtgggaagaaaaatcttaatccgcagggaacgattagacgagtttctgattctcaatgaggggaaggatttacgagacagacacgcagtaaaagcggtcaagggaacaatgaaaaatgaataagggacagtcctaagaccatccctctggtatgtatctgactaaaagccatgatatacctacacgcaaatagattatatcacggacaagtcctcagatacaaccagaacttttggaaaatgaggacaagatggatgtgaatgggtgcaatcgtccacccagttatagcttgttggtaggacaagtccacccaagatgcaaaaggtgttatgaatagtccacccaagccagaaaatgaagtgggtgcaaccatccacccaagtgaagccgactggtaggacaagtccacccaacttacaaaaagtgctgtgagaagtcataccaagtgtagctatgaaaaaagctgtccgacctatgacaaaaagtgtacgctactatgattttgagtgtccaatctatggggtacattttcaaagagttaatagtaaaaagctctattaaaatcaaaatgtaataaaacaatgcactattaaaaatgaaatttaataggaacttttactaccacttccttgccagacacagtttaaaagtaagcgaagtaacacaatgctattgtcagggcaaaaatgctaacgaatcgtgctattgttttttcgattttaatagcagacttctactgtttctacggtttttgctaaaaagtctgaataatagaacaatgctattgttaaggcaaaagtgctaacggattcgtctattgtttcgctgattttcatagcaatcttctagcatttctgttaagaaaagggagtgccggatacggcacataaaaagtgtgccattaaaggcacaaaattaggtgctgagggaacagttacagctaaaagtgaacttcataagcaagccctcggcgtttgagagcgaaatacacccatcgcacaaaacttcgttttgtactctgtgtatttcgctctgcgaggcttagccgccacaaggcggatgtgttcgcaagacgagtgcctatgcactcgctcacagggaaagtttactactcacatctcatctatcttatctgtcctcttttccaaaatcaaaactgggaaaggaggaaatcgctatgccaagaaattcatttgtgcagatgtcaaagctccataatgttcgtggaagaatctattatatctccagtgacaaaaaacaggaaaatctctatgcggtatatgaaaccacagaccgaaaattttggacagaacttgccaagtgcaatcaggcagaatttaagaaaagcggtacagagggaaaatgtatcgaagcaagagaatttatcattgccctgccggaatcctttgtggattatccgccagacggactattaaaatatatgacggataaattcaaaagtcggtatggtgttgattgtattgcagcactccatcataacaaacgaaagacgaattatcatatccatcttatctttgcagaacgaaattatcttgacgaaccgatagaaaagattgccaccagaaatatgttctatgatgagaaaggtaatcatgttcgtaccaagaaagaaatcctagacgagaatggaactatccgtaaaaggtgtaaggtgatcaagaaaggtgaggtctacgaaagacagatgtttaccatcaaggacgctcgctttaagcaggaacatttcttagatgaggtcaaggtattttataccgatgtcatcaacggacttgtcaaagatgagaaagaaaagctgtctgcattcaagcgtggggatgtctatcttgccactaagaaaatcggtaagaacaatccaaaggcagataagattacactcaataataaggtcatacaggactggaatcgtactgtggatcacgctttggtatcggggatggagcgaaaggaaatcttaaaggtaaagcaggaacagatttcaactccgattaaggaatccattcacaagtatggcaatcatccggagcttttgtttatgattatctttcgggcaatcgagctgttaaaagaactcataaagttgctgatacagaaacaggaacaacagaaagccagaatctccgaccttatggagcgaagaaatgaaaaacaagagaaacaaccagctccatccgttacacagacagacaatcagacaattcctgctgtgacccaaccattcaaagcacctgctactactaccgcagaaaagaccgttattccgccaagaccaagaatgtctgagctggcacacgattatgagatgcgacttgaagagattatggagaaacttaaacgacaaaacagagccattcatacgcaggaagtgaaaaaagaccttattgacgaggatttgaagaactgtacaggattattccaaggaaagaaacgaaaggaattgcaggcacagtctaacaaatacgcagaaacgattaagattatgaagcagggattatcccatatcgtgcaggattacaaatatccaacggtagatgcgttcctgcaagtctataaacaaggcaagtccgagtatgaatcctatgtcaaagcaaacaaggaatggaactccaagtatggagaaaactcaatccatcgaaagctggcagaaaaacaggcagaagttcagaaacgggaacaggacagagattttaactatcgttcgccatcagacagaggagctagataatctaattaaattcaaaaaagataaagaccatcaaattctttatcttttttgaatatttatgaaaagtcatcctgctatttaaagtgtctcattagatttttaattgtttcgactatcataagaatgattacgcagaaaaaggaataaaacaatgtggtattcatcttcgtgtttccaattttataaaacagcagaaatccaatgctaacaattatcacagaaataagtttatgtatccatttttgtttggtggttaaacatattttatggttacttataggtgcaaataatatacacataaggacaagtatcaaatatcctagtacagttggctttaaatagattatagcccacttatcaagacaaccgagaaaaaagctgcctaagatacatgttaactgcgttggagcatgggcacctccggtataatgtcgtaacaatgaaaaggtaattacccaaattagggtatagccgagtgtatgtgataaaactccccatacgaacaataacactatggttataaaagtattcaaaaaacattctaagccatatatgtatatttctaattgatccgcagaaacatcctccccggatagttctgctaacttattagcaatagatgtagcccacttcgtaatcattcaaaatccccgcttgtatcaaatcttgttgtatatttggcaaaagcacttatcacgtctttggaataagaacgtgcgatttgtgtagttagatgatttgacaattcaatcgttcctgatgtaatacgatagatatgtgccatatttacaatataagaacgatgggttcggataaattcacttggcaaatggacaataatcttatttagggtagacatttgttcatagcatttgccgtctacggtcaatatatccacataatgtaatctgctcgaaaatgtcaatatatctgcatagggaatacttacaatttcctgcttgtttcggtatatgtaggtattattagataactccttcgcgatttcatccaaacacagaaaaagagtattttccttgacgggttttagcaagtagtttaaagctctgacttcatatcctcggaatacatattctctaaaagctgttaaaaatacaataataccttgataaccagattcacgaaggcgtttagcaacctcaattccattcatttgccccatttgtatgtcaaggaaaaatgctgaagcctgtatagttgtgccttcagaattttttgaaaaatattcttcgcccgattcgtattcgtcaatttcaatatcccaatcatattgctgcccgtattttcttattccatttttcagccgttctgattcgatcacagaatcttcaagtatggttattttcattttcatagtagtttgttattctccttatccggtatcataatatgtacggaaaaaattttgttatcagatgtaatctgcaatacgccatctgccttttctacaagctcttttactcgtcttatcccaagtccatgttcttttccttgtttaacactcaaaatgtctccatcaatgctaccttttatcacaccatcataattattttcaatgtgaatcagtatcatattctggtaaggtttaatataaaaataaatgtatggatgctcggttggatcagagattataagtctttctcctgcttcaatggaattattccatatatttccaagtatggatgaaagctcaacagaatcaagcggaaaattttcaggagccataatagaatattctgtcttaattccgtgtttttcagcataatcaagttttgcggtaagtatgcagtcaatagcaatatttcccgttgctatggcactttgcgtagttgcaagagtgttatggtattgctctgtatatgctataagttcatcccatttcttgtcttttgctaatacgttgattgcatccacataaatctgcatatcatgtttcatttttcgtaatcgttcagttgtctcagataagctattgaactcagtcctttccagctcataaatcttttgttcttccagtaatcgtatgttttcttcttttgaataacctagctggtatatgtatagcatcaatactaaaaataaaataataaaaaacaagtcaaccaatgatagcctagctgaaaaggatgaatcaccaaatttatcaacagattccaaagtcagccttaatatgtagtgcccgattgcaagtccagaaattgcgatgaaaatatatgcaactttttggaacggtgaaagagatatgtctttgtttccaatagaatgaaataacaagacaaaaacagctatcattgccaaatataacatggtatatggcttccgtaatgttccacctaataatagctccagagacgctcctttataaagagtaacgggaataaagaacgaaatctgttctgcaactaagcaaatgatggaatacgaaaagccccaaaagatacggcgaattatactatcacgatagaacaatactgcatatccaatgtccaaaacacaagatgacatcaaagtgctgtaggatgatattcccattttattcagcgtgcataacacagcaaactgaaatgatacgaaaagaaacatcaaaactgcttgatgtttataatttgctcgaatacgcaattttttatggataaatattataaacaatgccagttctaagaaattaacaatatattcccatattgagtcaatatatagcatagctaccacttcctttaatcattctccgtcatattttatcatcaataaagtaggtacacaacataatatgctaccgtttgtgcatagtgagctaccattcatgcatagaggtattgaaaagtataaagattttgttatattcaaggtatactactacatcctaagtattctgagaatctataatatggagtggagatgataagatgtcgtactttaggaatattaacaggatatataatgtgtactagtatgtgttgcgtttcaattttcataaagataacctttaagaataattgaagataaccgttgttacatgattgaaaaggagtgaaggagtatgcattttaaaaaatctgttttaaaaaatcatttattgtatagcattataactttaatggctatagcaatgctatttcctattacggcatttgcacaagcttatgtacaaacatgggatcttgttgattctggcaaacatctagactatgacggaaacagcacttacatgagttatattaacactggggctgccacatggaatgcatataaatctggagtaatcagaaaagacagtgcttttgttgtagaagatgtatacgtaagcgatgtcaatgcttcgaatggatgggcaggcatgacatattctagtggtaaaattgaactcaatacctattatatgagcggttatagtaatagtaaaaaacagaatgtagcgacacatgaattgggacatgcattagggttggatcacagtacttcaacagatgttatggatgcagcaattacgggacatactagtacgcaggcattatctcaaaatgataaagattcatatgatgccgcatataataattattaggggagggagaacgctatgaaaaaatcaagtatctatggtattttgtctattgttcttatcgtaggaatgttttttacaggatgtgcatccaaaaataatgcaagtcaactgaatacaaatgtatctaacttgccaatccaccagatgcacgcatcttttgtatatgatactgataacattcgcgaagctgttggtatctgtgattacgtatttgtagcaaaggttgtcagttgcgatggaaccgagtatcgaaatgttataacgactgaagatgaaaaaggaaatcctaaggaggtcggttcgccttacactaattatactattcaggttctcgaaaatataaaaggtgaacttattacagataaacctattcctattgttaaacaaggcggaatttcagaaaaacaagatgctatttatctgtttgagaatgattcactgccttccgaaaattccatttatatctttttggcatatgcacaagaggatggttcgttactaatttctggtccaaattcaaatgtaatgtgtaacgattcgaatatgtattctattaattctgtctcagaggaaaaatcagttacagaatacgatgagtttattacatataaagatgctaatgataatgagattattccagttgatcgagagcgttataaatctatatatgagactgacaataattaatcattatttctgaaatatatagattaaagatggcaggtaggtgcttaacctatctgccatcttttcggttttatacctatatgtagaacagttcgtgcatgttgggctaccattcgtgcatagagggattgaaaaaattaaatactctgttatattaagcacataccatggtaaacaaataaagttgtctgtaattgtcagacaattaaggagggggggggtgaaaacgatggacaataagcaagtaaacaaggcaccccagaaaagtgcccgtctcgtacttcaggcagtgactgctattgctcgaagtaatgcaaattcattgtgccgtggtttgttgtatgaaccaaaagtaccaacgcagttaaaaaaataagattgggaggaattgactatgatgttaaaaagtttaaaacagaagattgcaaaagtaggtattggtttgttttgtgcaggatgtgtatttctttcttcagcagcatattctcaggcggcatcttacaccgcttatgcacttaaactgaataagactaataactttacctctatgcatgcaaaaacaacatccgatgattacatcacaaatgaggtaacagcaattaccaatacctcttacgcaaatttctgggctgtcaataacagcaagagtaaaatatctaataagtataagcagggtgttggaacaggatcttgtaatttaatctttaccaagagcggttataattctactaacacacaggtcggtatgggaatggaaaattatcaatctcaattatcaactgcatttgtaagtggaaatgtagattttagataacagaagggatgggcataaacctcttcgtgggtttatgcccttttggtaaagattatgaaaaaaatggttcttatagaaatcaaacattgtattgatcgtgcagaatataaagttgtttttattgctctaatgattttaaatattgcttcgtatattttatgtgtaaaaaatgatataggaaaaagttatcaatttattcgttcagcaaatgaaaatttcgtattacagggcactgaagcggcatatattccatatataatgtatctgttattgcctgtttatgcaacaattattgcatcactttccttaataagagaagaaaaaagcaatagttcaatcctacttattcaaagaatcgggaaaaagaaatatttagcaggaaaattatttggcattctgattgtaacctttttgacaataacaataccaatgctcataaatttattattatgccacttgacatatccaatacatggatatgacagtgcttggggagaacctgattacgctataggtttggtatcatataacgctgacaattttcttgatatggtgagattgcaacatccaactttatataatctaatatacatttttaattacggaatttttggctcgggattagctatcttagcttatgctctttcatattataacaaaatgaaagttctatatttcgcaaagatacctggtgctttgtttatattctatattgtttttaatttgattgtttctgtctttgggctaaatgaattctctatacaaggttatattatgcctaatgttcatggaaatataataggagaaattgttctgatattgcttatttttggattaagtattggcattatacagagaaaaataaaaaattatgaagttatataagaaaaaaattttgaatgttaatgttggaaaatgcttactagtatcacttataacatttgtaattagatatttttatgctaatgtgtacttggggtttcataatagtctggttacaataacagaaggagtacgttcacaaatatattttgggggaatactaatagatcattcgtttgaccttatatctttatcattttttgcgattttgtttatccttgagatttgttatcttacaatggacttatttaatgatgcaaatgataacatggtaattctacttcctcgttatgggaaaaaacacataatttataaggatatattaataaaaatgatattacgtgactgtattgtagttgtttccgattatttgttttttctttttgtagagcatacctctaatggcttagaagatttcaaagttatttttatgctattgatagagatttttcatttgcaaatgattagttatttgttttcattttggaaagattcaattataggatacatcgttgcatttattgtattttttattccagtaatggtgtgtggattttatttttcaatgggaaatgttatatggaaaatttggcattattccttgctacatattcctttatttaattggcataacaagcttattatatattatgtcgaagaaaattacgaatggactacaagcaatatagatttattgaattttaagtcaagctgtctcatttcagttatatcatccgctgttttggtgtggataggtaaatttctttgcgaaaaaaaacaaatattgtgaggtgaatgatatccatgaatttatatgtaaaatctatttcaaagtcaattaaaggtgaaaaagtgcttgatgatatcagttatacatttgaatctggtaaaatatatggaatatatggtaaaaatggttcaggtaaaacaatgctactcagagccattgcaggttttataaatacagacaaaggatacataaaatataatcacaaggcattacataaagatatggatgttttaccagatttaggagctgttattgaaaatatttctttttggagtatgtattcaggatttgaaaatttgaaaatgctttccaatataaaaggaattgtatcagatgaagaaatatatgaaataatgatatactttggtcttgatcccaaatcaaagaaaaaagtaaataaatattcattaggaatgcgtcaaaaactagctctttgtcaagcactgatggaacatccaaaaattttgcttttggatgagccaactaacgcattggatcagcatagcattgatttatttcgtgaacgtatattggaagaaaaaaagaatgataccattactatactgacaagccataataaagaagatattgaaatattagcggatgagaagatatgcatggaatttggtaaaattaaggagttgatgtaatgaagaaatttgtattaactatctgtgttgtaatcatttgtatggtgacagccttattctatggaaagactgggataaaaacaactacaggggttcatgatcctgatattgctttatcagaaaatacagctatggaaattttctatacaggagggcagaaaacttcttactttaacaatgaaagtaattactcattggatgatatggaaaaagattcttctttaatagctcgtataactgtaacaaattctcgtgaaatgagtttacgatcaacaaaaacaatggtaaaaatagaggaaatctataaggataattctgctaatctttcagtaggtgactgtatttacattatagaacctgtatcatttgttagaggtgaagaattttacactaacggatggcaatatctgaagaccgaagatacttatttaatatttttaaaaaatctaggatgtattgatgggtataaatacaccaaagaggaagaaaattcatttatgcctgtatcggaaatatattcaaagagaaatctaactcatgatgaaagttgtgtggtttttgattcggcggaaactctctattcaagtatatctatgtttgcatttttgacctcagaaaaaactatagtagataattatgagaaaatatggaaaaacattacaaattcaggtaagtatgaatgatttaattatttatgaatgaatctctcctattctatttcctgtgagaagcgtatcaatgttagaaattcatggagatactgaattaagcaatatggaatcattcaatcttaaagaaactaaaaatggagataatagaaattgaataaaaagaaattggcaaagagtgttgtaggcattgctttaattgtaagtgtagctatacttatcgttgtatgtgttggaaaaataaagcacattcagaataaaaaaaatattattggtacatggaagaatgcaaatgcagaggaagtgtttacctttcaagaaaatggaggacttgttgtaaacaaagatatgcccgaattgggtattacctgtggcaatgcattatatagcatatcttcctcaaatatgatttttgtggaacagagagataatagcgtgaattttgagatagaagtagatcaaaacgaattaacaatcttctttatgggtcataaatattgggaattaacaaaatagcaattgcatataaagcgatactcatgatatccataaccataaaatatagagccgatgaatcactcgttatttcgattgtgagttatcggctctatttcattatttatggaagggctaaagaaatatcgtattttatagaaatacttttgacagatttcttctcatttttatgttcttttatcaagtgctataccattccatattcatcgcattcacccaatcttgcatttctgaatcaagatacaaacgggcatattctagtggattgtcaatcgccagtgcatccaacattcgttgagagttaggagtagtaatcaatccatcttctgccttgccacagtcaatccgaagtatgtagccattgtaataattgatgtctatgatgttgtgatatttattatattctgcatgaacgatattcatattgcaaagtcctttctcttatctgtttcagttgtagaagcatcttgaccagttccagccgattatgtgatttatataatgttattagctgttaccggattttgcttcccttgtttttgcccttatgaggtgtcgtaacacaagggaaaaggatataacataagggaaagtctaagggaaagctcacttgccaaaactgtagtaaaatcaaggcattgcggattttatcgtaacactttataataccagttaggtgttaaagaattgtaggtatcaaaattcaagtttgtcaatttgccctttgagagaggagaaatccttttctcaaagggctttttctatttatacggatattcgcaaactacaagataaagctaaaacttcatatactctaagcacaaggaggttgaggtttggctatgaataacagtttagcagaagtacgcccggaacttgttcctgagtggtcagagaagaacttaccgcttaaacctgatgagattactttcggttcaaataaaaaagtatggtggagaggtgcttgcggtcacgaatggcagacaagcgttaaggctcgttctaatggagaaaaatgcccgatatgttccggtgcgagagtgattgcagggattaacgatttggcgacattagagccgctactggtaaagcagtggtcgaaaaagaataagataaaaccgacagaagtttctattggttctcataagaaagtgatatggagatgtgaaaagggacacgaatgggaagctgccgttaagagcaggacaataaataaaacgggttgcccgtactgctcccataataaagtgttggcaggctttaatgaccttgcaacacttctgccggatatagcagccgagtggtcggacagaaattgtccgacacttccaactcaggttacggtctttgccaatcgtaaggcttggtggaagtgtaaggactgtggcagagagtggaacacccttatttctacccgttccggtgggagtaaatgcccgtattgcagtgggtacatattcctgaaagggtttaacgatttgcagacaacacaccctgaaattgcttcggagtggtcggagaagaacttgccattgaagcctgatgaagtaaatgcaaagtcgaggaaaaatgtctggtggagatgcagtaaatgcggtaacgagtggaaatctgttatcaatgcccgtgtgaaaggtacggtatgccccgtttgtgcagagagagaagtacttgccggatataatgatttggcgacaacagacggtcagcttcttagcgaatgggattatgaacagaataaactgaaacctacagaggtatcacgaacttcggcaaagagagcgtggtggaaatgcagacacggtcattcgtggagtatgaagataaatgaaagaacgatattgaagaaaggctgccgaatttgtgagcaggagtatttgtcattgtttcctgctttggcggtcagctattattctaataggaaaggtttgaaagcagaacttggttctgaccgattgcttggagttccgcttgaaacatacataccttcagaaaagttggctattgagtcgggaagtgctgacgagaatatagaaataatgaaagcctatatgtgtaagcaacgagggataaggctgattaagctgccgatgaaaggcacagaactggattatgccaataatttaaagaaagcttttcagagcgtacatatatttatttcttctgatacagaggaagatgtggagataatcaaaaatacatttgaaagatggagggacagccaatgagagagaaaacctatcatctatacttaaatgaagaagaacgaagccgagtgatacaatcgctcattgaactgaagaacaatttagcagctcagggacgatacaccgatgcagtagatgatgtcctctgcaaagtgcttgaagcaaagaaaaagaaattgaaaattgaatacatttagaacgtgttttgccgtctgtttcctaaccggagcaggcggcttttttaatttccaaaaatttttttgaaatatttttggaaaagcggagattttgggtgtgcatttcatacccctttgtccaaatgagtgaaggggttcattccggatagcaaaagcggaagccttttcgcttgaaaattgaataagtcattcactaagactttatttctgatgatagccactttagcaggtacgccgtgatttctgtatttcagaatagcgagaactccggctatgagtatcaggttgcccctgatatggcgatgacagtcagaatgataatgatacttctctacggagctggcggagtacccggcagaggttagaatcctatgatacagataagcagtctgttccttagtgacttcccataagcattttgcttggcaaggggtgttgagaacaaatattgctatgaccgattaggaaatgagtcggtcaggtacatagccataatgcggtggctatgaattttcagaaaggagggcaaaaagaagtgtcaaactgcaaaacgatttccgtatgtaaccagaaaggcggagtcggaaaaaccaccacaacagttaatctcggagtcgggcttgcaatgcagggcaagaaagtattgctcatagacgcagacccgcagggagatttaacgacttgtcttggttggcaggatacagacggcttgggtatcacgcttgcaacgaaactcacagatgtaatcaatgaaacgatgacagaccctatggttggtatcctgcaccacgaagaaggtgttgaccttgttccggcaaaccttgagctttcagcaatggaatttaaccttatgaacgcaatgagcagagaaactacactcaagaactatctgagtcaagtgaagaacagatatgattatgtaattatagactgtatgccttcgcttggtatggttactctcaatgctttatcggcggcagacagtgttatcattccggttcaggctcagtatttgcctgcaaagggtatgacacagcttgtgcagacaatttcaaaagtaaagaagtatatcaatccggatattaagatagatggtatgctgcttactttggtggatagccgaacaaaccttgcaaagagtacggtggaagcactcagggcaaacttcggtaatcagataaggatgtatcgaacacaaatcccgattgccgtaaaagccgctgaaacttcttccaaaggcaagagcatttatgcttatgagccaaacagcacagtgtctaaggcatacgctgaatttacaaaggaggtgttagccgatggcaggaagaaagagcgacttcactctcacgaagctcgatgatttatttaccacgcaggcacagcgagatgaagaacagctttcaaaaatccgagatattccattggagctgattgatgattttcccgaccatccgtttaaggtcagagacgatgaagatatgatgcagcttgtggagagtgtcaaggaaagaggggttattactccggcaacggtaaggcagaaagaggacggcagatacgaacttgtttcaggacacagacgaaagcgagcttgtgaactggcaggatttgaaacactgagaagtgagattgtagacctgaacagagatgaagcgaccattttaatggttgagagtaatttccaaaggtcagagatattgccgagtgaaaaagcctttgcctataaaatgcgtttagaagcattaagcagacaagggaaaagaacagatttaacttccaacccactgggtcggaagtcggatggcaaagaaactgctcaaataatcggagaacaatcgggcgacagtcaaacgcaagttcgtcgttatattcgtttaacaaaccttgttcccgaactgcttgaatttgttgatgaggggcgtattaaaatgcgtcctgccgtagaactttcttaccttgatgaagattgccagcgtgatgtggttgacgaaatcgacctgaatgacgcaaccccgtcacacgaccagacaatccgtatgcgaaagttattcaacgagggcaaccttacaacagaagcaatccacgctgttatgtctgaggaaaagccgaaccaaaaggaaaaaatcgtgttgaggggcgatagagtaagacagcttatcccgaaaaacattcccgtcagtcagacagaggattttgtctgcaaagcattggagtattacaacaagtttttgcgtaaccgtgcagaacgtgacagcagatagcctgttttacagttcccctttctcacactctaaccccttagttatatttttacctaccgaaaatgatatatactatctcacttgaatataactatctcaaagtatatgtctatctctaaggggcaatcgcacagtatgaacggacgggaggtgtatggtaaaatgaaaaattaacgaaaaatccgcatttgtttttcggcaggtaaatcttgtcgtaaaagaaaatccacaaaggcacatcgtagagatacggtgtgtttttcaatttttacaggaggaaacgcaatgataaagtcaaaattcaaaagagtcacgtcgcttttcttggcgacccttatgtgtgtgaccacttttgcaggcattggctcgacaacagcatatgctgcttcgggagaaaaagccgatgtttatatggtcgatttccctcgtgatggtgatgctaattacgatggggtatggggacacagcaatttgaccttgaaaaatggttggcataccggacgttccaattttaccaatcttaaggctattggctcatactcaggcaatgttgcttattgtattgagccgggaatttcgctcaaggtcggtcagacaatgaataagtatgacgaaaattattttaataaccttgcagccaatggggttatttccggagatgaaatccgtctttttgttggtcgtattttacagtatggctaccgtgggacaatctcgacatcttggaggtcacagaatgaagcggcagcaaacagcattgcacaggcttatgccacacagcttcttatctgggaaactgttatcggagagcgtgatgcgaacttcaatcatgtagcagccagtggttgcagtaatgtgaaagatgtcatcaatgcaaagcatccgcttcgcaataagattttcagttattacaacagtatggtgcagagtgtacagaaccatgcgaccataccgagcttttgtaataaatcatccggttcggcaaagacaatagaacttgagtggaacggaagtaagtacacaagtgtgagaatggcacagtttataccgtagagggcaactcaggcgacgcctgcaagcaaagacagtacgcagtcggaagcagcaatatctatggatacggtattccggcatattaaaaattccagacggtgtctggaaaattgaaaagatggctgctcagttgagtagccatcgggtacattatgagaaatcagttgtttctctgttattcaggaaaatatggtgtgtgtgataagtgaagctgaaaagcatatcggcattttctttactgccgtctaaaaaggaaatatcatcggcaaggataaaaagaattgctaacagcttcttgatatatccagtgtagcaggcataatctacatagatgttggcgatatatccctcggcaaattctatcaggtcagcgtcaatttcaaagctattggatagttcgtaaacgattttgataaatttatccttgtcagcaattcgctctttacttggaacacttctgcggttcttctgtataaattttaaaaaatcatcagcttccgtaaagtcgggagtgactgagctgtcagttcccaaatctgttttgtaatcctcaaatttctctttttcaaaccgattactgaatattatcttttgttcgtccattccttttacccctaagtttattctatggagattgtttaacttggctcttgggttgtgatttgtctttcgccattaacaatcgtgaattactacttttatagtataacataaaaatagttgggaatcatcactaatagttggtttggcttcctttgggtgcgtgtgatttgaaatcgacttaacctatactattagttatggaaacacactaagggaggtgatgtgatgaagctcgatacaatcggcaagaatataagaaagttccgacttgcgaggaaattacgccaagaagatttggctgagagaacagatttgacaacaaattatattggtatggttgagcgtggagagaaaattccgtcactcgaaactttcataaagatagtaaatgctttaggtgtatcatcggatatggttcttacagatgttctggaaacgggatatacagtcaagaactcaatgctgaatgagaagcttgaaaaacttgttcctgaagatagaaacagaatttatgaagtcatagatacacttgtgaagcagtcaaagcaaatacttccataaaacacagaagttcgtcctaatcgacgagctttctttttttcagtataaaaaatttcagctatcgacaaatttttcgggacttcgacagagcaaatatgctataacaacaactgtcagtgatagacacatactaatagacataggaggaagtagaagtgaacgacattttcagacaaatagcaaaagaaaatggaacaaccgaaaaagcagtaaaagaggaaatgcagtttgccattcgggaagcaatgaaaagtgctgaaccggaagcaatagctttttggaaagcagttgcaccggacggaaaagagccgccgatagaaaaggtcatagcaatgattgcattgaatgttaataatagaatgtacaattgaggtgcttcggcatctcttttttagtattctttaaaagagtcgtattaggtgtttgtaaaaagtgacaccttagtgtctgaaaggttacatttctgcctgaaatcttgaaatgcctgaaaatttaatatataatgttaaatgactaactgtaacgaagaagaattataagatgaagaggtgttactgatgaagatatgctataacaaacttcaaaaacttatgattgacaatcaaatgaaaagacaggatttaatgcgtgcagccgaaattacatcatacgctgcaacgaagataaataagaatgagccagtatctcttgaagtactgatgaggatatgtcaggtgtttcattgtgacatcggagatatatgcgaagttattttagacgaagattaaaacacggaggtaattatagatggcaaccattgatgatgtttacaaggaagttcttgagcaggcagagaatttcaagaagtatgcacagtaaatgagaggtgtaaatgtaaatatgttttatgacgatttaaatacagaagaacaagtatcataccttattaaaccaatccttcaagtccttcaggaagcaggtggacagttagagcgttctgaaattagagacagaattagtgagttggatgagcatattgctgaatttgaacagaaactatatacatctaataaaacaggaaatcagtacaaaaaatttgattttaagtttaattttgctattaaagagcttagttatgtcggactcatatcttatgtgaaattcaatccaaagattacacttactcaagatggagcaaatgtagatttaacagattttgatgttaagacagaagtaagggataaggctcgaagctattgggaggaacattcgactaagaacaaatcgaaaaacaagccagtagaaacactggaggttgaagacgaggagaatgaatccacagatgacgaattgttagatgatttcaaggtaaaacttcagagtgcaatcgctaatatgtctccagcaaagtttgaacaattttcacgagcacttcttacaaagatgggagtggagtttaccaacaaaggggttcaggtgtcaaatgatggtggtatagatggctatggatatcacgtagatgccgatgattttagaacaaccagagtggttattcagtgtaaaagatttaattcaaatccagtgagtgagccggatatcaatcaatttcttggggcgatgaacaaatatcaagccgattatggagtatttattactaatagccgatttaccaataaggcaagagaggctgcgagagaaggtacgccgataacattgattgacggaaatgatttaatcagactggttattaaatatgaattgtatataacaccagtcacaacatatgtattggatggtttttataccgaagattgacactaacgatagcataatttactcgaaggaattttagaagggagcatagaatgatggcaaagcaaaagacctatatcgcaattgacctcaaatcattctatgcttctgtggagtgtaaagagcgaaatcgtgaccctttgacaacaaatcttgtggttgcagataaaagcaggacagagaaaaccatctgccttgcggtatctccgtcattaaaaagttatgggatacccggcagaccacgcttgtttgaagtcgtgcaaaaggtaaaagaagctaataacaaccgaagatggaaagcaccaaatcgtacatttactggttcatctgatgacagtacagaattaaatgcgaatccagcattggagattgattatatcgttgcaccacctcgtatggcatactatctggagtatagcactaagatttacagtgtttacttgaaatacattgctccggaagatatattcccttactcgattgatgaagtattcatagatgcaacaaattatctgaacacctatcagatgactgcaagggaacttgccatgacgatgatacaggatgttttgaaaacaacaggaatcacagcaacagccggaatcggcacgaatatgtacttgtgtaaaattgcgatggatatcgtggcaaagcatattgagccggacaaggacggtgtgcgaatagctgaattggatgaaatgtcatatcgccggaaattgtggagtcatcgcccgataaccgatttctggagagtcggaaatggttatgcgaagaagttagaggaacacggactttatacaatgggcgatattgcaagatgttctatcggaaagccgaatgaactgtataacgaggaattgctgtacaagctgttcggtatcaatgcggaattgctaattgaccatgcttggggatatgaaccttgtacgatggagcaggtcaaagcctataagccggaaaccaatagtgtatgttcaggacaggtacttcactgcccgtatgattacgaaaaggcaaagttgattgtaaaagaaatgaccgaccaaatggtgcttgatttggtggataaaggacttgtaactgaccagcttgtgttgacaatcggctatgatattgagaatttaagtaatccgaacctaaaatatcaatacaaaggcgaggttacgattgaccgatatggacgcaaagttccaaagcacgcacacggaacagcgaatcttgagaaaaagacttcctctactcgattgattaccaacgccgtgatggacttgtatgacaggatagttgacgagcatttgcttgtacgcagaataacaatcacagcgaataaacttgttgatgaaaaatccgtcaagcaggaagatgaataccagcaactcgacctctttaccgattacgaagcacagaggaagaagcaggcggaggaagaagaaaaattagaacgggaaaggcgtatgcaagaagcaatgctgagtatcaaaaagaagtttggcaagaatgctgtgttgaagggaatgaaccttgaagaaggtgcaaccgccaaagaccgaaacgagcaaatcggcggtcataaggcttaaacaaactgaaatttgaggaataaaatatgggcatattagaaatagtttttaattcaagaaaatttgatttgaatgatgatgttctgatgggatttgataattactttgataaaaaaagtaaggattataatagtttttgtttagacgaagaagatattaatcctttacaaaactttgtagcacagattaagtctgctgactcagatagtgtaatttatgtatctacttatggctatgaaatcacaaatagtaaaggagaaaaatcaacatacgccgatgctctttggattgacacagttttacctatttcccaaatagagagatatattgaaaaaagtggtgttgctgaaccaagtaatatttcttttgttggagatagtgatgaatgtggaaactataaagtatggattatagctcaggaagagaataatcctcatattatagagttgactgaccgcaagaagatagaccatatgataatattatattgggattgataagttataaaattcccatttattgggaagtcgctgagaacgaaaaatcgaaagttatggaggtactttatgaacgagagagaaaaaattatccgattatggtttaatatgtggattaagaaagcagatttaggaattgacaatatttttacagatgatgttgtatatactgagagttggagtcctaaatatgaaaaccgcaaaacggtaaagcactggtttgacgaatggaatacacgcggaagtgttcttgtctgggagattaagcaattttttcatcaaggcaatcaaacaatcgtggagtggtattttaaaagcaaaatgaataatggaaatgttgaagaatttgacggaatatctttaattgtatggacacaggataacaaaataaaatcattaaaagagtttggttgcaatcttcataattacaatccatatcgagatagtgatattcccgtatttcgagaagaaaaagcaaattggttttgagaggactataaattcaagtttgtcgagcaaaggaggtgctgtaacagatggatgaacattcctatgacgatataatcaatctgccgaatccgacatcgaagaaccatcctcgtatgtcacttcacgacagagcagcacagtttgcaccttttgcggcacttacaggacacgatgcagccattaaagagactgcaaggctaacagatgaacggttagagttaagcgatgaagtcattatgaaattaaatgaccaattaaatatgattagagataatatcggcacagaacaggaaatatcaataacttatttcgtgcctgatgataaaaaatccggaggagcatatctcacgcattccggcatagtgaaaaagattgatgaatttgaacgcaaattgattatgcaggatgaaacagtaattccgactgaacaaatcagcgtgatacagggagaaatgttcaaaggactatatgagtaatagcttggaaagggcaaacaatggaaacaaagccgagaatattatacttaaagaaaatattagaggaacgaacggacgaggaacatccgctttcgacgacgcagctaatcaatatattgaatgatgaatacggaatatctgcacatagaacgacggtcacaaaagacattgcagcacttcaggagtttggaatggatattgttactatccactctactcagagcaaatactttgtagccagccgcaagttagaactgccggaactgaaactgctgatagatgcagtggagtcatcgaagttcatcacaaagaagaaaagcgaaactctgattgagaagatacatacgatgacaagtcctgggcaggtggcaaagctgaagcgtaataactatgtggtcaatcgtattaagccggataatgagcagatatattacattattgacgctataaacgatgccatcaacgcaggcaaacagatttcttttcagtattatgattataccggattaaagaaaaaggttctaaagaataagggcgagatttataaactcagtccttataaacttctctggtgtggggactattattatgttctcggatattctgagaagaaaagcaaggttatcaatttcagggtagaccgtattgcttccaagccggagatattgaataaggacattattcctatgcctgatgattttgatattgagaattacacaaaggaagttttctttatgttctcaggcgagaaagttcttgtggatttacggtgtgataacagcttgatgaaaacaatggttgaccgttttggagaagatgtgacaacccttgcgtatgatatgacttctttcagagtacagaccgaagtatcagccagtccgaccttttttggttgggtgtttggctttaatggcaaggtacaaatacttgcaccagaaagtgtgaaagaacagtacaggcagatgattgcacaagccgatgagggtatgcagcaaaaagaaaacaaaaggattgtaaactgataattcttaaatacgaatataacggttataccggagatgagagatgggcgattattacggaattgtctgtaaaagagctttgggagaagtatccacttgttatagaaagatattctccgtttgttcatctttccattgcacagggagaggtaattgacgatataaaccgaaatgaggacaagtatgcaaagagaagcagtcgcacacttgactgctatggatatgacgatgaaatgtcatcacagttccataaagaacttgccattatgtttgacgacccgtttgaaagagcagaggaagaaaggcttaccttgcagaccttaacgagcaggcagaagcattgttttctcggctggtaaagcagcttttcgaaaaaagagggcgtaacggaagccctcaaagcggaaaatcaaatgctgtgggtgcagaggatgaacaacatccgtagcgctgctatggaaatcgtttcgagtgagcttatatactgttaatactaagtaagaaaagtcgctgtcaacagacggcggcttttcctttgcgggtagtattcaagaagtcataaagttccgtgagtaatgaaagaagccagcgtttgcggaaatgtcacaatttaatgcggaaaaatatcaaatgccagttgctttttcactctcgagatgatattattagtatatatactaaaatatttgaagagaggtgaaatatttgcgaagagacagcagcgaaacaaagaggaaaatactgaccgtatgcgttcgtctctttttggagcaggggtataaaaacaccactgtcagtcagattgtggacgaggcaggtgtggcaaggggaagctagagttgatggcctcgtggtcaagcggttaagacaccgccctttcacggcggtaacacgggttcgaatcccgtcgaggtcattcaatcattatattttcgtgccgatgtggctcaattggcagagcagctgatttgtaatcagcaggttatcggttcgagtccgatcatcggctttttggacctttagctcagttggttagagcaaccggctcataaccggtcggtcccgggttcgagtccctgaaggtccattttacccgggtatgaagaaatgattgaaaacgacacatggcctagtggctcagttggttagagcgccgccctgtcacggcggaggtcgtcggttcgagtccgatctgggtcgtttatatggaatcttagctcagctgggagagcatctgccttacaagcagagggtcataggttcgagccctataggttccattcaatgtgaagcaattcgcatttatgcctttgcaggcattgaggaatgccggcgtggcggaactggcagacgcacaggacttaaaatcctgcggacctaatcgtccgtaccggttcgattccggtcgccggcatttaaaacaaaatatgtgtgtgtagctcagctggatagagcacttggctacggaccaaggtgtcgggggttcgaatcctctcacgcacgttagtaacaaaaagagacaggactagatgtcctgtctctttttgttacaagccgaagcggatgatacgaacccgtgattattctaggttatcaataattttgaatgcgctttgtacatagttttatagaaattttttaggaggtacttcagatatgagtaagcttttggtggcatggcatcattttaagacgattacgacgcatagaattctggtgatgcagggatgtttcaagatggggttgtactggcaggggttgacacatgatctttctaagtattccccaacggaatttaaaacaggcgttcagtattatcaaggagacaagagcccgaatgctgcagagagggaagcaaagggctattcagagtcctggctgcatcataagggcagaaaccgtcatcattatgaatattggacggatgtgacgaaggatcgcagtcttggtattgtcggaattaagatgccggttaaatatgtagctgaaatgtttgcggatcgcgtagctgcctgcaaaacttatgaaaaagacaggtatacaacgatgagtccgtggagatactataagagaacgaaagagtatattacaattcatccggaaacacgtaagcttttggaacgcttgctcaaaatgctggcagttaaaggcgaggatgaagtataccgctatttgcaatatctgatcagagttaaaaaaacatattgagaaacacataaaaaaacaaatccgggtcatactattgacgtaccataattaaaggaggttaatcgtatggcaaagaataaaacaagctacaataataaaacatccgactgcagtaacagtacgaatagtaccaatagcaccaatagcacaaactgcagaaacagcgcaagtgataaggcagggcatgcagcgaagagcgcatacaaaaataccgcagatagcatgaaaaacagtgaagattcggaagatgagtattcacagaagaacacttataaaaacgcatacaaaaacagtagggaacgatagaagaataaaaataatttgacagctgccgcagtctattcgactgcggcagttttttcgcatataatataaataaaaggagtatttgaaagtcatggcatttcaattaatttccgcaagggaagccgaaagcctgatggatcattgggagtatgttgttattgatcttcggaatgacagagattacagaaaaggtcatatgcagggagctctcaatcttccctatgaatttctggatcattatatagaaaaacttcccaaaaacaggcgatatatcctttattgcagccatggcggggccagtatgctcgccggcaggaggatgtcagaacaggggttggatgttttaagtataagtggtggaattttatcatacaggggtcgcttatttgtataaaaagtcaaaaataataaattacgtaaggcgtgtcttgcctgagatttataaaaagtatatactaaagattgaagccgaacggacagaggagaagaataatggagaataatacatttgaatatgttgtaccatgtcattttggcatggaagccgtacttaaaagagaaattatggcactgggatacgaaatcgtcaatgtggcagatggcagagttacctttagaggagatgaaaaagccattgcacgggcgaatatttttttaagaacagcagaaagagttctgctctgtgtaggcagatttaaagcaaagacttttgatgaactttttgaggcaacgaaggcgattccatggggagattatatcccggtcaacggaaaattctgggtcaaaaaggcttcaacagccaagagtcagttattcagcagttcggacattcagtcaattgtgaagaaggcaatcgttgaacgtctgaagatgacatacagagtagattggttcaaagaagacggagatgaatatccgttaagagtttttatcctgaaggatgaagtaacgcttgcactggataccacaggtgaatcacttcacaagagaggttatagaaaattgaccggtaaggcaccggtgtctgaaacattggcggcggcattgattatgctgacaccatggaataaggatcgaattctggtggatcccttctgtggcagcggaacatttccaattgaggcagcaatgatcggcgccaatattgcaccgggtatgaatcgtgaatttacggctgaggcatggaaacatcttcttccgatgaaggggtggtatgatgcagtgacagaggctaatgacctgatctgcaatgacgtggagatgcgtatacagggatatgatattgatggtgaagttatcaaggttgcgatggccaatgccagagaagcaggtgtggatcatctgatccatttccagcagcgtccggtcagcgaactgcgtcatccgaagaagtatggttttgtgattacaaatccgccgtacggtgaacgactggaggagaaggaagctttgccggctctttatacagatatcggtaatgcgttcagacatttggacagctggtcctactatgtactgacttcttatgaggatgccgaacgatatattgggcgaaaggcagataagaatcgtaagatttataatggtatgattaagacttatttttatcaatttatgggaccaaagccaccaaaaagagtggataacaggaggttcaattgaaacacttaaagcgtttcattgttctggcaatggtacttggcataggaggtattcttttgatgcgggtacctgccacacagtttcgcgggcaggattctcaggaactgaccagacattacaatttaattaaagcaaaggacattaacagcagaacaattagcctctatagtgatgaccggaaagtggaaacgagcggcaacgaccaaatctggatgtcagatgatatgacattaatgattccggaaacgatggttaatgatctctttcaatgtacagcggccaggatggatggtgatatcatcaaactgatcaaaggtcagaaaacctgtgagattgacattcaaaaaaatcgggttcggacggatgacggatggacagaggccaggatagcagaatttgatcggcatggcaatatctgtctttctgtgaactatcttgcagattattttgattatgattatcagtgggatgatgaaaataacacggcaatgctggcgacaccggaagatgaaccggtgtcattgccggtcagatatgatctgcgtgattatggaagagtttctgaagtaagggaccagggaagctggggaacctgttgggctttcgctgctttgtctgcattggaatcttctctgctgccggatgagaaatgtgagttttctgtcgatcatttggcgatgaataacggatttaatgcggatctggacgatggcggagattataatatggcattggcgtatatgacaagctggaggggccctgtgacggaggcgcaggatccttatggcgatgggaaatatgaagatggcctcagtgcggcggtacatcttcaggatgcggtgattatcaacgaaagggattattcgcagattaagcagttgattatgcaatacggagctgtgcagtcggcaatctattcccagccggatattcgttcactcagcgcctattataatgaggaaaatgccgcttattattatcccgaaagtcaggaatgcaaccatgatattgatattatcggatgggatgacacctatccgaaagaaaattttgttacagagccggagaaggacggcgcttttatctgcaagaacagctggggggccgatttcggtcagaatggatttttctatatatcctacgaagacccgaatattggtgtctatggtgtatcctatacgggtgtggaagatgcagataattatgaccggatctatcagacggatttgcttggatggacgggatctattggatataatgaaccaatggcctggttttcgagcgtttatcagacggacagcaagaacacgcttcgggcggcaggtttttatgccacggatgcagagacatattatgatatttatctggtgagagattttgagggcattgaagatatggaccgcagagtttttttacagagtggctatattaaagataaaggctattataccattccattggagaatccacagcccttggaggcagaccagcgctttgcggtgatcgtgcagatatacaccagggactccatgcatccaatcgcgatagaatatgtatccaacgagctgacggtggaggccgatatttctgatggtgagagctatatgagctataatggcagtttatggagccatatggaggaagcatccgcatgcaatgcctgtctcaaagcttatacagatttaactccggatcaataagatggggatgaattgtgacgggtattcgttgggagaatgaggagagataattatgcagcgcattatatttgcaacaaccaatgagaataaaatgaaagagatcagagagattctggcggattttccggtagagatcctgtcccttaaagaagccggtattcaggcggacattgatgaaaatggcagcagttttgaagaaaatgcggcaattaaagcggaggccatcgaaagaatgactggtgcgattgtgttggcagatgattcaggactcgagattgattatttaaacggtgaaccgggaatttattctgcacgttacatgggtgaggagacttcgtatcacatcaaaaatgccaatctgatagaaagattaacaggcgttccggatggaaagcggacggccagattcgtgtgttgtgtggcagcggctttcccggacagaaaaacagaagttgtccggggaacaattgaaggccgtataggctataaagaggaaggggaaaatggcttcggctatgatccgatcttttatgtaccggaatatggttgtacaacggcatctatgtcttcggagacgaagaatgccattagtcacagaggaaaggcattgcagctgattaagcctgttataggcacttatcttgatacaaaggggatataatgagagtacttcttgtcagtgattcacatggaagaaatcagaatatggaaaaggttatcagaaaagtcagtcccgttgaccttctgatccatctgggggatctggagggcagtgagggctatctggaggcaatcgcaccctgtccggtagagatggtggccggcaacaatgacttcttttcaaggcttccgagggagaaggtcattacgattggcaggcatcagatctttatgacgcatggccataattactatgtgaattatggctatggggaattaagggcagcagcaaaatcaagagggtgcgattatgctttctttggtcatattcacaggcctgtgttggatgatacggaagaagtaactgttgtcaatccaggaagcatttctcttccaaggcaggataatcgaagaccatcctatgcgatcctggatgtcaaccgaaagggagattttgacatcgaaatctattatctctagggaggattctgcgttttttgaagtcggatagcagccatttttgttgaattacatatgcaaaataaaaaatttaaaaaaattaaaaaaaagggttgacatttggctgtttgtaatatagaatatatcttgcgtcacggatgaaatgctgttgatgaaacggggtgtggctcagcttggctagagcgcttgatttgggatcaagaggtcgcaggttcgaatcctgtcaccccgacgatgtatgatttacatcaaaacaaaacattgttttttgaatatgagtctgtagctcagctggatagagcaacggccttctaagccgtgggtcgggggttcgaatcccttcaggctcgtttctctttgcttaattgcgaagtgatatggtgggtatagcgcagttggttagcgcgccagattgtggctctggaggcccagggttcgaatccctgtatccaccttcatagaactgatgtaagttttatgcaggactttgggctatcgccaagcggtaaggcacaggactttgactcctgcattacgttggttcgaatccaactagcccagctaattgggtgaattgaataagatatgggatattagctcagttggtagagcactagacttttaatctaggtgtcccgggttcgagccccggatgtctcatttgagcaagcctgagaaggcttgtttttctttccggacttattgtttcaggaagaagaattgaatagattatgcggatatggcggaactggcagacgcgccagacttaggatctggtggggtaccccgtgcaggttcgattcctgttatccgcagtatgcaaggcaagaagcagaagcattttctgcttctttttatatatttcgctgataactatggtggaagtaccggaaattatgatacactatccgtatattagaattttgagcagatatgcgataagagagaaggtgacagccggtggaaaatgaagaaagagaagtaagagggatggcagtggtttggaaacgcctgagggctctggcggtctttctgcttgtgctatccatgcttgagagtgatggtattgagcaggaaattatgaggatctctattggatactgcgcggaaggcggcagccggctggtcagctatgggctggaagaagacagatttgaggatcagaacttcattccggtaatctatatgtatgacaatgaagctgagatgatggatgcattggcagaagaagaaatcagcattgccctgttggatggcaatgaaatcgtattcgataataaaatgacagacaatcggattattttgtggttaaaaatcgacaatcaatacgataccgttatttgtgtcagaaagcatctgatggaggaaaatctgaatacagcgatctgctttacaaaggcctgcacagatgaaaatggtggaaatgttaaggttgtgccttatttgcagtggctggattatctgaggacagcagggtatgctgaggaggatgtgatgccgtatctggcaccggattttgtcgatgaaatgctggaagaaaggcactttgatcggatgtaacctcagaaattgacaaatacttaacttttggattggttgagcctctgctttttggaatttgtaaataggtaaaatggctgtaaaatgaaaacaaagaatctgaatttttaaaagaagtatctaaaaaatttggtaaaattaaagattagctatttacttattagtaaatgtgttgtagaatagggatgaagataaaaattcaacatagaaagggagttaaaaaaatgtcaaccgtattatatgaagtaaaaggtaatatcgctatccttactatcagccgtgaaaaagcacttaacgctttaaattcagaagttctgaatgatctgaatgcagctcttgatgctgtagatgttaacgctgtaagagcactgatcatcacaggtgccggcaagaaatctttcgtagctggtgcagatatcggtgaaatgagcacattaacaccagaagaaggcgaagctttcggtaagaaaggtaatgacgtattcagaaagattgaaacattccctattccagtaattgctgcagttaatggtttcgcattaggcggcggtaatgaaatctgcatgagctgtgatatccgtatctgttctgacaatgcaatctttggtcagccagaagctggacttggtattacacctggattcggtggtacacagagacttgctcgtatcatcgctcctggcttagctaaggaaatcatctactcaacaaagaatatcgatgctgcaaaggctaaagaagtaggtcttgtaaacgaagtttatacacaggatgaattacttccagcagctgaaaagcttgctaataagattgctaagaatgcaccaatcgctgttcgtgcttgtaagaaagctatcaacgaaggtcttgatcttcctatggatgaagctattgtagttgaagagaaactgttcggcagctgcttcaagacacatgatcagatcgaaggtatggatgcattccttacaaaacgtaaagagaagaacttcatcaacgcataatttatcgggtacatatttaacgacggttcagtcgtaaggtgttatatatttattaataggaggtattcgtccaatgaaagtaggagttatcggtgcaggtacaatgggttcaggtatcgcacaggcatttgcacagacagaaggatacgaagttgtattatgtgatatcaatgaagcatttgctgaaaaaggcaaagagaaaattgctaaaggtcttcagaagaaggttgccagaggcaaactgtcagaagaagaggcagaagctattatcggcaagatcacaacaggtcttagagataaatgtgcagactgcgatctgatcgttgaagcagcttttgaagatatggcaatcaagcatgagatgttcaaagaacttgatacactctgcaaaccagaaacaatcttcgctacaaatacatcatcactttctatcacagaaatcggtgccggtgtgaacagaccagttattggtatgcatttctttaacccagcaccagttatgaaactgatcgaagttattgcaggtctgaatacacctgaagaaactgttgagaagatcaaagaaatctctgtttctatcggcaagacacctgtacaggttaaggaagctgctggtttcgttgttaacagaattcttattcctatgatcaatgaagctgttggcatctatgctgatggtgtagcagatgttgaaggtattgatacagctatgaagcttggtgcaaaccatccaatgggacctcttgcattaggcgacttaatcggtctggatatctgcctcgctattatgaacgttctttatacagagacaggcgatcctaagtatcgtccacatccactgttaaagaaaatggttcgtggcggtaagcttggtcagaagacaggcgaaggcttctacaattacaagaaataatcttaattattaagaacaatgactgctgtacattccagaattggcgctgggtgtacagcagtttttttgtaggtatgatttttatacgaaatgcggtcagcagagcggattttaaatagattttacattgtaactgtggtggtactgaattgtaacgggcaatcgatgacaaaatggcataataagaggagaaaatgtctggcaaaaaaagttactttttgtaaatagactattgaaatgagccccggtttttgataacattgaatgggaaaatgattcaatcattaacaaaagtcaaagtgattttcgttaattgcgccaaattgatagacgatatagatataatggaggacatttcacatgaatgaacgaagaatagaactagaaggtgaaatagaaaggatgaaacagcggttaagctataacatcaagcgttatcgcaagcttagccgtgtttcacaacaggccctggcagatatgtgtggtctgcatagaacgtatatatcagatcttgagaatgcaaaatgcaatcccacactcagcgttatgatggttttggcagattgtctcaatgttcagttggaagatttactgaaagagtaataaaatgtaaatccgctatttacttttgttggaatatagcataaaataatagagtattatcgacaggatttactagaaatacatgcatcaagcatgtaaaaacatataaggagctgagtaagtttatggttagagcaatcgttggagcaaactggggagatgaaggtaaaggcaagattacagatatgttggccgaggattcagatattattatccgtttccagggcggcagtaatgccggacatacgattatcaatgactatggcaagtttgcattacatcttctgccatccggtgttttttataatcataccacaagtgtcatcggtaatggtgttgcattgaatatcccatatcttattgaggaactggagagtctgacatcaagaaatgtgccaatgccgaagatccttgtttcagatcgtgcacagattttgatgccatatcacatgttattagacgcttatgaagaagaaagacttggcggtaagtcctttggctcaacaaagtcaggtattgcgccattttattctgataaatatgcaaagattggttttcaggtcagtgaactttttgatgaggaaggcctcaaagagaaagtttatcgtgttgtagaaacgaagaatgtcctgattgagcatctgtaccacaaggagaagcttgatccggaagagatatatcagacattgcttggatacagagatatgatcaagccttatgtatgtgatacatctgcatttttacatcaggcattgaaagagaataagagaattcttcttgaaggtcagcttggttctctgaaggatccggattttggcatttatcctatggttacatcttcatctacattggcatcttatggtgcaatcggtgcaggtattcctggatacgagatcaaggatgttattacagttgttaaggcttattccagtgcagttggtgccggtgaatttgtatctgagatttttggcgaagaagctgatgaactcagaaagcgcggcggtgacggcggcgaattcggcgctacaacaggacgtccaagacgtatgggctggtttgatgcggttgctacaagatacggctgccgtgtacagggtgcaacagaagtagccctgacagtactggatgtactgggttaccttgatgaactgcctgtatgtatcggatatgagatcgatggtgaagtgacaagagacttcccgacaacacgtctcctcaagaaggcaaaaccggtctatacaacattaccaggttggaaatgtgatatccgcggcatcacgaagtatgaagatcttccagagaattgccgtaactatattgagttcattgagaaggagctggaagttccgattacaatggtatccaatggccctggtcgtcatgagattatcaagcgtaaataaactaatgaaatatttataaattataagataaagactgtttcgacagtctttatttttttagaaacattttaggcttttctcatcataaatacacaattatatcgtacaataagagagtcaaatgaagaacaaagaaggctgatggaagggggaatccattagcgtgaaagggaaaggtgagaagatcggtgtttgacgaaatgtattatgaagagaacaatattattccaaaggaagaatataagcatattatcgatactttacataaggagaagaagttccgtccggccaggatttcggttgtccggaaggtattttttaacagagagatcaactatctgacagatgccgtcagtgtgaatcaggagaatacggacagctattgcgtgatgatgactgattgggatacagaccatctgatccttgagaagaaaagtaagcgggaagggcttatttcgaagagctatacacggttgtcggaagaagagtttgaacggatcctggatggtgattatgaatggatggcctccgccagagagtcgattttcagagatttttatttgcagctgaccatcaaccagctgagaccgggcgttgttgtagattatgagcgtcaggcttttaggatgaacagtaagaaggaatatatgatttttgacctctctattcgttcaacttatctttttacaaaggatacggttttgagtcctctgttggagcagacagaacgtctggagcagaatcgtgtggttgtgacctataagcagatggcagaattgccgggatttatttatcgaatgacaggaattaaacagaagcaccagtgcttgcttccggaatttgcataggcaagtgataagaggatgttctgtggctgttgacagaatctgacagccgcagagcatcttttttgtcgtctatagattgaagagaaccgcatttagtgataaaatacattatgcgaattagaaagagaaaaagttatgatagattttgagaagaaggtgagagaacgtgaaagaaaagattcagttattgtcaagaggcgtatttgagtatgagaatccggagattgaagtatcagagaaggagattgctctggaagttgaggcgggcagccactattcgggtacgattcaattgaacagccgcaatcatattgaaatacgcgccatgattttctcatcgaataaatggatgcagtgcctggagtctacagtgatcggaacaacgggatgtattcattatgtttttgatacacaggcattggaaacaggtgaagtgtgcgaaggatgcttttatattgtgagcaatggcggtgagatcacgattccgtacagagtaaaggtatgcgcgcctttttgcgattccagcatgggcccgatgaatgacctggatcagttcgcatccctggccagagacaattggtcggaggcactgaagatatttaagacaccggaatttgggcgtgtttttttgcataataagaagaatcggcggatttatgcggcacttattaagggcagtgatatgtcactggcaatggaagaatttctgtgtacagtgaagcggaaacaggcggtacagatgagtgtgtcacaggatttgattgaattcgataatcttgagcatcccgtcagcgaacatctgctgatcgagaagaaccagtggggacatgtgaatattcacgtttcaacagagggggatttcttaagcgtttataagaagactgtgacggatgaggattttttgggaagctattatcagttggagtacaatattgtgccgggaatgcatacagtggcttccggcaagatcattcttgagacgctgaatcagcgtattgtggtgccggtatgctgcagacgtgagaaagccagagatgtggattttattgagagaaagacgttgaaggcttcgtggatgcatttgtgcaggctgtatttgaagtatgcgctgcatcagattgacaggaatcagatgattggttatgccagagaggatattaatggctgtctgaataacagcagggatattcttttcaaggttgttgaagcggattttctgcgtgaggaaggcaagaacgaggaagcacagaagattctggatggtatcaatggccgtgagctgagatatcgttctgcagtcgcatacagttattttctctatgtgaatgcgctgtgcagacaggatgaacattatacggagtacgtccgtgattctattcagttttatgaggaaggtcaatatcatgaccgatgggaactggtctatatgctgatgaagctggatgcaagggaagaacagcaccagcttaaggtactcagacagacgaaagcgctctatgacaggcatctgatgggcgggctcatgtatttggaggctgttaagataatcaataaggatccatcgctgatccgggaaatgggtgcttttgagatcagtctgttcctttggggaatacgtcatgattgcctgaatcgcgaaacgattttcagatttgcggatcttgtcctgcgcatgcatgtatatcacggacagtgtctgcatgcgatgatcgagatgtgttcattgtatgagacaaagaaccttctttcagcagtcctgcatctgctgattctcggtgagaagaaggatccaatctaccatcagtggtatcagctgggcattaaatcttccatcaagatgcagggactgtacgaatactatatggcgacactggatatgaagaattgcagggaattgccggttccggtactgatttattttcagtatgataatcggctgcaactgaaacagaaggcatttctgttcagatatgtgatcgagcatgagcaatggctgggcaaattgttcgaggcatatgacggtattatcaaagcctttacttttgaacagctgcagaagggtgttattaatgaggacattgccgttttgtatcatcattatctgacgaaggaagcgatgacgccgcatgttgtgaaggcgatgccggcgattatttttaagcatcatattcattgtgatcatccgggaatcgtgggtgtgatcattgattattccgagctgggagaggagaagtattatccgctggatcagggggatgcttatgtggacctttatatggatgattatcggattgtacttgtggatacccggggcggacgctatatgtcaacaatcccttatacgattgacagactgatggatgccggccgttatatcaggatctgctatgagcaggggcgggataataagatgctggtactcaacagaagtgaacgtgcattgaaatatcagatgatggatgatgtatccattgaaacatacaaatgcgttctgagcctgccggatgtaagcagacattatcagaagacgatcctgaagaatctgatcgattattattatgataattatgagggagagacccttgagaaatatttgcttcagctggatatccagcttctgggccatgcagagcgcagccatattattgaatattttattcagagagggctgtttgacaaggcttatgaagctatccgggaatacggatacgaaggcattcaggataaacggatcatgcggctttgttccagagtcatccgggaaaagaatttcgcaaaggatgaactgttggtggaattagcctattttgcattttccaacggcaagtacgacgagacgattctgcagtatctgatcatgttttatgcaggaaccacagagcagctgtatgcgatatggaaggcagccggtgattttgaagtgccggcggaacagctggaggagcgtctgctctgtgagatattgtttacggagaatcatgtggccgagggctgtgacgtttttgtttcttattatcatacacatccgggacatcggttgatccgggcatttctcggatattatggctatcattatctggttcatggacagacatccggagagaagattttccagattatggagatagagctggatcaggtggagaatgcccgagatgtatgcgctctggcgctgctgcagtattattcggaggcagaccatgtagaaccggaattttatgagaaactgcagcaggaggtagctgcctttatggataagggaatccttctgccgtttttcagaaaatatgccgggaatgccgaggtgccggaggaattggctgattttctctatgcagaatatcataccagtccgaaagcagcggtgacaattcattaccgtctgcatcaggagtttgagacggagtggatcaatgagccgatgcgccatattcttgggggtattttcatcagaactttcagactgtttgcaggtgaggagatagaatactatatctcagagcaggatgaaaatggggagaaaaccggtgagaaacatttactgcaaagggaagaggccatggatgcatggccggaaaccggtgtggaactgctgaaccggatgaatcatgcaatccagacagaggacagccaggcagtgaatgaaatgatctgttcgtatgagagaatcaatgaaatgacagagcagttatttgaactgaaataggagtgacacagagcatggaaagacaaaggttaatggttggatacgatctgtgtgcggactattcacagatcagttattacaatacagaaaaagaagaaccggattcggtcaattttgatggacagaacgaaatcccgacagtgctgtgcaggctgttttccaatggtgaatggcttgccgggcagcaggccctaaaagcggcggaggcaggcaacggtgttttggtgcgcgattttattgtacgcattgctgacgatccaatggtggatgtggctggtgagcgtatggaaaaggccggactcataggcatatttttccagaaaacgctgaaggctcttgagactgtgtgtgagggtgcggaggtcggatttatcacgattaccatggaagacgtggatctggcaacagcggatgcgctgaagcgtgcagcggcttcaatgggaatcggcgcacagttgctggcgctggaaagccatcgattgagttatgaatattatgcattgtcccagcgacgggaattatggacccatgatgtgggcttgtttgaatatgatcgccggggactgcggtatcatcatctgtctgtatcctggaagcatcatccgccggtggtaacagccgagacaacgatgctgaaccagtatctggatggtcatgaactggcagatccggtaccgcctgagatggacagacagtttcttgaagcgattaaggaagtatcagccagaagaatgatctcaacctattatctgatgggtgagggattctctggggcagaatccggcaagagctggatgaatctttcgctgaaacagttatgtgccatgaaacggcatgtttttgcgggacagaatctctatgcccgaggtgcctgctatcacagttttgatcagggaagctttggaagaaaaccgggatttattgcagcgaatgccggtctgctgacgaaagatatctatctgcggtcggtacataagcatgcaccacagaagctgatactggcagcggctgggacaccctggtacagtgctgtttcaagaaaagcgatcattatagacggtcaggaacagttgataatcagaatgcgggatccgctgacgaattttgagcagacggcggtgatgacactggatgctctgccgcagcgtccgccgaagacaacgaagttattgatcgagacttcttttcaatcagagacagattgccatatccgtgtgacagatatgggatttggcgagatttttgcggcgacaggcaaagtgtgggagatgcattttgatataggggaggcttcggaggcatccgggcagtctgcgaaggaggctgtcattgaggcaaccattcctcaggaagtttttcctctggatatgaagatgtccggaactcgtattttctcgctggaggaattatgctggtatttgtcgaagaatgtttatataacgacctatgatcttttcgatgagaagatgtttttctggatggataagattacaggtagccattctctggcgctggcactatttaattacaaatccgccggcaaaccattaaaagagattgtgcgtctgcttctgaatgcggttgattatctggataatggggaaattgcccggatctacaataagctcacggagatggagcatcagaatcctttagagcagatgcgccttgcggcggacaactataaccgatacggacattatatggctgctttgaagaattatcaccatgttgtctatcagatgacgcatgattatgacagtgagatgacaagacagttcaaggctgacacatggcacaatatgggcatggtttttctgcggcttcacaatatcaaatgtgcggcggaatgtatgaagcgggcctttgaactggtgaaaacccaggattttctggcaccgtatatgtatgtgctggagctgctgggagatcatgagaagattctgacgttgatccgtcaggaagatatcccgacggatatcagtgatgcggttctcaatcgttataaagaggccgagcatctgtgtgagcattcggaggagaatcggaagatacaggatggtctgacattgggaaatggtcagacaactgcaaaatattgggattttgtcagagattatctcaaccggcagaagaaaaactatgatttgacataaaaggtacagaatgcgccgggaatgtctccgcgtaggaagatagagggggttgaataaaatggaacgacattattatacacagtacagcgagcatcttcagagagagatgcatgtattggtttatggttatacaggggtgccgatcatcgtatttccatgtcaggacagtatgtgtgacaattttgagaatttcggcatgatcgatgtgcttcaggattatattgatggtggaaaaattcagctcttttccgttgatacggtggataaggagagctggtccgacacatggggtgataagggctatcgtgcctgggtgcaggaatgctattatcgttatatcgtagatgaagtccttccgatggtacatgagatcaacggtacaggacagttgccgttgacattgggctgtagcctgggcgcaactcacgcagccattgtattcttcagaagaccggatctgttcggcggtgtgcttggcatgtccggctgttatgatgccacctatttcacagatggatggtgtgatgagaatctgtataataattctcctgttcattttctggagaatatgccttcagatcatccatatatccagctgtataatgaaagaaaaatcattctctgcgtaggacagggcaactgggagagtgagggaatccgtacaacgggtcagatggcagacatcttctacagaaaagggatccacggatggaccgatttctggggatatgatgtggatcatgactggccgtggtggaaaaagcagatccgctatttcctgccgtttcttgttgattaataacatccttataagacgcaaaagctccggcttttcttttaactaagaaaggccggagcttttgcaattcgtgcttgacaaattttcgtggtaattataatatagagaatagaaaatgtggtgagaaagaggagtagatacaggatctcttcagagagagcggtttggcagctggaagaccgcttagagcaatgtgtattgaaggtagcttttgaacaggatggctgaacaggaacaggcggcgaagagttgacgaccggttttagtaggctgtaacgggtggctccgttaaaggctctgaaggcatatggaagtgccatgcatcagacagcggatagattgctgtgcgcatcgaagcgatgaaggatgtgtgtcattggaatatgtgaataaaggtggtaccgcgagctctcgccctttttggatgtgagggctctttttttacgcgaataatgagtcaaagcccatgcttgcatgtggccttgcagtcactttacaaagaagacaggagattaaaattatggaaatggaaaaaacttataatcctgcggccattgaagagaagatttatgaccgctggcttcagaagaagtattttcatgcagaggtagacagaagcaagaaaccttttacgattgtgatgccgcctccaaatattacaggacagcttcatatgggtcatgcccttgacaacacgatgcaggatatcctgattcgttgcaagagaatgcagggctatgaagcattatggcagccgggtacagaccatgccagcattgcaactgaggtcaagattatcaataagctgaaagaagaaggcatcagcaaagaagaactcggacgtgaaggtttccttgagaaagcatgggaatggaaggaagagtacggcggccgtattatcaaacagttgaagaaactgggctcttccgctgactgggacagagagcgctttacaatggatgaaggctgttctaaggctgtagaagaagttttctgcaagctgcatgagaaaggctatatttacaaaggttcccgaatcatcaactggtgtcctgtctgcaagacatcgatttccgatgcagaggtagaacatgtagaacaggtcggccatttctggcatatcaagtatccggtagccggtgagccgggaagatttattgaaattgccacaacccgtcctgagacattactgggcgatacagcggttgctgttcatccggaggatgagcgttatatggatctcatcggcaagaatgttattcttccgcttgttggcagagaaatccctgttgtaggcgatttacatgcggataaggataaaggtacaggtgctgttaagattacaccggcccatgaccctaatgattttgaggttggtaagagacataatctgccggagatcaatgtgatgaatgatgatggtaccatcaacaagcttggcggcaaatatgccggccttgaccgttatgaggcaagaaagcagattgtcgcagatcttgatgcacagggctatctctgtggtatcgaagatattacacatgcggttggtacccatgacagatgtaagacaacggtagagccgatgatcaaacctcagtggtttgttgctatggaagaaatggcaaagcctgcaattaatgcaatcaaaacaggcgaattgaaatttgttcctgaatcttacagcaagacttatcttcactggcttgagaatatccgtgactggtgtatttccagacagctctggtggggccacagaatccctgcatactactgtgatgaatgcggtgagatcgtagtatccaaaggtatgccttctgtatgcccgaaatgcggatgcacacatttcacacaggatcctgatacactggatacatggttctcatcggcattatggccattctcaacacttggctggccggaaaagacagaagaactggattacttctatccgacagatgttcttgttaccggttatgatattattttcttctgggttatccgtatggtattttcaggttatgaacagacaggtaaggcaccgttccacactgtactgatccatggtcttgtcagagactcacagggccgtaagatgagtaaatctcttggcaatggtatcgatccgctggaagttatcgacaaatacggtgctgatgccctgagactgacactgatcacaggcaacgcaccgggtaatgatatgcgtttctactgggagcgtgtggaatccagccgtaattttgccaataaagtatggaatgcttccagatttatgctcatgaattttgagcaggcagccgagaaaggtatttccatcgatggtgtatcactggcagatctgacacaggctgacaagtggattctttccaagatgaaccgtctgacgaaggatgtcacagagaacatcgataagtatgaattgggtattgccgtatccaagatttatgatttcatctgggaagaattctgcgactggtacattgaaatggtgaagccaagactttacaatgacgaagacaagacaaaggcagcagccctctggacactgaagacagtcctgatcaatgcactgaagctgcttcatccgtatatgccgttcatcacagaagagattttctgcaatgttcagaatgaagaagaatccattatgatctccaagtggcctgaatacaaggatgaatggaactttgaagaggatgagaaagccgttgagctgatcaaggaagctgtccgcggtatcagaaatacccgtacaggcatgaatgttccgccaagcagaaaagccaaagtatttgttgtatctgaatctgaagaagtcagaaatattttcgagaattccaagactttctttgcaacacttggttatgccagcgaagttgcagttcagtctgataagacaggtatcgctgaagatgctgtatctgtactgatccatcaggcagctctctacatgccgtttgcggatcttgtggacatcgacaaagagattgaacgtctgacaaaagaagaagataagatgaacaaagagatcaagagagcacaggggatgctttccaatccgaagtttgtcgataaagcacctgctgataaggtgcaggcagaaaaagataagttagagaaatatacacagatgctggcgcagatccaggaacgtctggcagcactgaaataagagtttacgattacttgaattaaacaatgttttatcccggattcctcccagacaaggccatcatcgacttttgtcaggggggaatcttgcaggatgggagagataagcatgaattatgcagaggcagaggaatatattaatcagattcctcgtttttcaaaagtgaaatcagaagagaatgttgatgagatactggccttatttggtcatccggagaaaaagttcgcttatatccatgtggccggaaccaatggaaaaggatctgtctgtgcatttttggacagtatgctccggatggcaggaaagaagacggggctctttacgtccccgcatctgatcacgacaacggaacggatgaagattaatggccagaatatatcggaagaagcgtttactgaaatttttgaggaactgctccatgttgtcaaagtgcgcgaaaaggcaggacatctgcatccgacgtattttgaatggctttatctgatggcaatgctctggtttggcagacaggggattgagtatggtattattgaaaccggacttggtggcagactggatgccaccaatcatatcacgcagcctgttttaaccatcattacatccatcagctatgatcatatggaaattcttggctcaaccctgacggaaattgcaggggagaaggcgggcattttgaaatcaggcgtgccggtcatttgtgacggcagtgaaccggaagcgatggctgttattcgtaagagagcggcgattttacactgcccattgaaagtgattgaaccggaacaggttaaaattctcttaaatcggggcaaaaacattgattttttattgcaggataggtatgataataagagttacaggattcatgtgcagacagaggcggtttatcagaccatgaatggttctctggcatggatggctgtaaaggagctgcagaagcaggattcagaactgcagcagacggaagatggtgtttttctggagggcatggcgcatatgcactggccgggaagactggaagaactgcttccgggggtctatgtggatggcgcacacaatgtaggcggcatcaggaaactccgtgagtccattgcggctagttttgcgggcagaccggtatggctgctttttgcagtggccagtgacaaggattacggggaaatgatacgaattctctgcacgatccctgaactgaagggcgtgacagtgactgagattgagaattatcgacggacagatcttgagacagttgcatcaatatttagaaagaactggcatggatatgtgggtcattcatataatataaatgaagcaatcaccacaagtgagcagcaggcggcgaagtatccgaatgcggtacttatttgtgcgggatcgctgtatctggcaggcagtgtgatcgaagcactgcagcggtagatggtgcatcgacagggagagacgatgcaggaaggacggacagatgattaattttgaagaagaattgaagaaatttaagccaagccttgaaattgatcaggcggaagaggcgatttacaagaatgatctccgggatgtaacggacatcctggaggatatgatgaaggaagttaaaattgcatcaggaaacaagcgcttttagggggatagcagatgaattgcataaagtgtaatatgcccctggaaaatgtctatgtatgcccacattgcggtcatgtggacaaggtggccaagaagatcatatattcatccaactggcattataaccagggactggccaaggcaaaggtacgagatctgagcggtgctgtgacatcactgagtcagtcattgaaatataacaaacgaaatacagacgcacgtaatcttctggggctgatttattatcagatgggagagattgtggcagccctcagtgaatgggtcatcagtgtccattttcaggagcgcaacaatattgcggcggactatattcaggccattcagaacaatccggccaagttaaaggctgccaataaggtgatccagaagtataatctggcgctgagctatatgcaggagaataatgcggatctggcgatcattgagctgaaacgtgtggtgaatatgagccctacatatatccgggcctatcagctgctggggctgctttatatgcagagaaagcagtatgcggcggccagaaaggtactgatgcgtgcagttaaggttgacagaaataatatgaccacactgcggtatctgaaggaggttaaccgccttcatggcaaacctgagaaaaatcagcatggacgtaaggaagaatttatgcagatcaatgacccgaatcctatcgttatagaggaagggtcaggtcagaattatgcagattacaacacaggatttttgtcttttatcaacattttgattggtattgttatcggtgcggccgttatctggctgttgatcgtgccttcaatcaccaaaaccaaggcatctgaatacaatcaggcagttgtggaatacagtgcccagatttccgagcgcaataagaatattgacgatctgcagaatcagattaccgatctgaagagccagttagctcagtatgagacaactgccagcaatacagtggatgatgccggtgccagtgagcagaaactgatagaagctgccagcaattatctgcagcagaatcttcaggatgcaggtatgctgatcgctgaaatcgaacctgcagccattacgaatgcccaggagaagaagatttataatattatcaaggaagcaacaaagagttctgtgacggaaacgctgtatgcgaacggcaaggacagttttgataagaaagactatgtcggagctatcgatggtatgaccaaagtcctgcggatggacgacagctattcctatgctgtgttctacatgggacgaagctatcagctgctgggcgataccggtaatgcagccggctattataaacgtttgattcagtcttatccaaactcagatttgatcgatgatgcaagaaaatatctgaaccagttgggcgacacatcaagcatcgatgccgttgacatcagcagttcggatacatctgataccactgacagcagcgataatagcagtgacagtagcgataatagcagtgacagtggcgataatagcaatgacagcagcgataatagcaataacagcagcgataacaccggtgacaatacaggcgatggtttgtcagataatggtgacggcagcggagaataattttcttgcgattgagaataggtcttaggactaaataaatagtgaaaacacaaaagaaaagcatgactttctaattgtagggaggacatgctttttcttattcatgtggaaaatgcggcaaggcctatgctggcatgaggtcttgctgttggtaaagactagtggcaaatccctatacaattataaattgaaacaagaatacatttttgaaaaaatcaatagttaggtaccttaataaaaataaataacgaaattgttttatgaaggatagacactaacctcagatggggaggagatttttttatggaatatcgtattgtccgcagcattttgtttgtggtgcccggccgggaaattgatcattttcaggcggaaacaattatcaggtacacggaagggctgctcaggcagcagtgcttccggttgttggtttttgatctggcggatacagtctttatggatagtgccggtgtaggcatgatgatcggactttatcgggaaatcagggcatggggcggtgctgtttatatcattcgcatgcagagcggggttcggagaatttaccggatggccgggctgcataaaattattccgtgttatgaagatgaagcgcagtttttggcagcagtggaaggaggcggagccggggatgagagataaaatgcgtctgacaatgaatgccattgcggaaaatgagtattttgcacgggtgacggtggctgctttttcggcaaaaatggatccgacgatggaagaattgtcagatattaagacagccgtttcggaagccgtcacgaatgcagtcgtacacggttatgacggtaaaggcggaagcgtagagatcagagcggaaattcaggatgaatggctggaagttgaaattgaggacgagggaatcgggatggatgatgtggaactggccatggagcctttatacacatcgcgtccggaaacaaatcatgccggcatgggctttacatttatggaggcgtttatggatgagctggaagtgacctcgacatcgggacagggtacaaaggtgaaaatgaggaagaagattgaaaggccagcagttcttcgcagcaaaaagaggtccgtcaggtgacagatgtccgtgagcagcttcaaagggcacaggcaggggacaaggaggccagaaattatctggtacaggagaacatcgggcttgtaaaacatattgtcagccgatatacggccagaggagtggagaaagaagatttatttcagatagggatgatcgggcttctgaaggccattgactattttgacctgagttatgatgtgcgtttttcgacttatgctgtaccgatgattgccggcgaaattcgtcgttttatgagggataatggtgccattaaggtcagtcggtcgattaaagataatcgggcggcagtgaatcgtagtagagaacagttgctggaaaagctgggaagggaaccgaccctcagcgaaatcgtgaaggatgttggtatgtctatggaagatgtattgctggcggtcaattcagggcaggaggtggcgtcgctgcagcagacaatctatgacggtgacggcagtagtatccgattgatggacaaactgtctgcccgaagcggagagggagatgcggccctggatcggatgatgctggcggattcattgtctgcactggatcagagggagagagaaattattgttctcagattttattatgatcagacgcagtcacagattgcaaaaaggatgggggtatctcaggtacaggtatccaggctggagaagcggatactcagaaaaatgaagatgtatatttgctgatgcatagtgctgtttgtttttgagatactatcggatgtgaaatccattaaaaatgaaaacagagttgaaaacaggagatgagataatgaaagcagaatcaacaacaggagatgagacagcaaagactcagaaacaggttgtaatctacttgctggcggatgattatattgaagttgaggtgcagccgttgactatgggagatctatgtgaaattgtgggaacggacaggaaggtggcggattttgtcaaacagatgtcggtgacaggcctgcagcctcaagagacggggcggagtgtcatctctgttttaatgttggtggaagtaatcacagtgcaggtccggaagcaatttgcaggtatccagtgccagtgtgtgctgctgggagcggaacagttgattgttgaatggggaggcaaaaagacggcaccgtggtgggtgacgattttgaagacggtatgcgtgagtctgatcattctgacgggttcggcttttaccatcatgacttatgatcaggatgtggatgtggcgggggtgtttggtcggatttatcagctgtttgtgggccatgtgccgacacagcccgggattcttgaggctgcttatgcttttggtgtggctgcaggtattctgctgttttttaatccttttgtttcggcggcaaagagaaaggcaccctctcctgttgagattgaaatggagaaatatgaatcagatatcagggatacgattgtcaaaattgataatcggttaaacaaaagataagattatatgaaagatttcgtttcaataagcagaaactgagaaacgaagggaaacaggctgtttgacagccgttgacagggaaaaagggttaagttataatgaaaggtactgtaaatagaaagaaaggcgattagcaatgaatttcaaagaaagagattttataccgatgctgtttggcggggacatcaatacatacagtgttgcccgtgcattttatgaacgttataaagtgaaatcctatacatttggtaagtttgccacaggtccgagttaccagagcagaattattgaatatacaccaaacccgaagattgacacagatgaagtttttatgaagacagtgaagagcttctgctccaagcatgcagacaagaccgttgttctggtgggctgcggtgacagctatgtggcattgatcagcaagcataagaatgaactgccgaagaataccattgcaccatatattgattttgatttgatgaacagtctccagcagaaagagacattctataaactttgtgagaaacatggcgtggattatccgggaaccattatccacaacaaagagatgggacatgattttgagatgaatttcccattccctgtgatcttgaagccatccgacagcattcagtactgggagcatccttttgatacacagaagaaggtgtacacgattaaagataagaaggaactggatcaggtgctggatgacatttacggggccggttatacaggcaaactgatcattcaggatatgattccgggtaatgatgagtatatgcgtgtgctgacatcctattcggatcacaacggcaaggtgaaaatgatgtgccttggtcatgtgcttcttgaagagcatacaccgcacggattgggcaatcatgcagtcattatcacagagccgaataaggaactgatgatgcgtgtcaaagatttgctcgaagaactgcattatgtgggattttccaatttcgatatcaaatacgacagaagagacggcaagttcaagttctttgagatcaatacaagacagggccgaagcaattattatgtgaccggttccggatttaatgtggcagaatatattgtggaagactttgtttacggcaaggaactgccgctgcgttacgccaaagaagagcatctctggatggttgttccaaaagccgttgcctttaagtatgtcaaggatcctgctctgaaggcaaagatgaaaaagctgatcaaagagaagaaagtcgtgaatccaagcttcatgaagggagatctcggtatgccaagactggcccgtatgatcaaaacccatctgagtcattttgaaaagtataagaagtactatagctagtacatcgttttcgaaataactataccatttacttgcacagatgtttgaatttgaacctatacgtatgcagttaattgcaaggaggaaatacgtatgaaaaattatacattaaaagaatatgcagatttgctgtcttctgtcgatatgctggcagaggcggaaatgatgggcagggatgagacggtcattacatatctgacgtatgattcaagggcagtgacacctggaacccttttcatctgcaaaggtgcagcctttaaagaacagtatctggaaaatgcgatccaggcaggtgctgtggcttatgtttctgaagtacaatatgaaacagagaccaaggtgccgtgtctgattgtgaaggatatccgtaaagccatgccgccgctggctgagatgtatttcaacaaagcatggcaggaattgacggtcatcggttttggcggtacaaagggaaaatccacatctgcttattatatgaaagccattgtggatgattatatggcagccacagggggcaaagaaagtgctgttttatcatccatcgacatatacgatggtgtgattcgacaggaatcccatattacaacaccggaatcggtggaattacatgagcatatgcgccatgcggtagacagcggtattacttatctggagatggaagtttccagtcaggcgttaaagtatgaccgtgtgaataatatgcagtttgatgtggcggtttatctgaatatttcagaggaccatatcagtccgatcgagcataaggattttgaagattatatttcatctaagatgaagatgtttgcgctggctaaacaggcagttgtcaatctggatgcggattttgtggagcgtgccttaaaggctgcagaggatgccggcagcttcaagacattcagtctgaaggatccgtctgcggatttttatggctacaatattcacaaagaagatggagaaatcattttctctgtgaaatgcgataagtttgatgagacattttcactgaccatgccgggcttattcaatgtggagaatgccgttgccgttgtggctgcagcgacactgctgaacattcctcttgaatacatcaagtccggtcttcacagggcaagatccagtggccgtatggaactgtatacaagtgccgacaagcgcgtgacagcggttgtggactatgcccacaataaactgagctttgagaagttattcggttccacaagagaagaatatccggatcatgatatcgtggctattttcggatgcccgggctataaggcctatatccgccgtaaggaccttggtctcattgccggagaatattccaagaaggtttatctcgtggctgaggatcccggcaaggagcctgtacagcagatttcagaggacattgcccagtatgtggctcagaagaattgtccgtatgagattatcgaagacagaggtgtggctatccacaaagccattatggagtgcaagcggcctaccgttcttctgattaccggcaagggcaatgagacacgacagaaatacggcacgatctatgcggattgccgtacagatgtggaatatgtcaaggaatatctggaagaatataaccattcaccttcccatgtactggaaaatcagaatttagactagttttttgcgaaaaacatgataaaatatgtaagaggtcagtatgcattcataatgaataaacatacaccgagaagcaacgataattttaaggaggataagtaaaatgaaaatgagaaaagtattaagtgctcttctggttgcagcatgtaccctttcactggcagcatgcggcagttccagcagcaagagtgaaacaacaggcgcatcaggagaaactgcagcaggcagtgccaacacagcaaaggttatcgatgtggacctgacaagtgaagaatatgcatttggtgtggataaaacacagcctgaactgcttgaacagaccaacacatttatccagaagatcaaagatgacggtacactggatgccatctgtgcaaaatatttcggtgatggtgaacctgaagctgttgaatcagcagaacttgacagttccaaagaccagttggttgtagctacaaatgcagctttcgagccttttgaatacacaaagggtgaccagtactatggtattgatatggaaatcgccaaacttcttgcagatgaacttggcaaagagcttgttatccagaacatggatttcgacgctgtatgcttatctgtcagccagcagaaatgtgatattgctatggcaggtctgacaatcaacgaagaaagacaggaatatgtaactttcacagattcttattatcaggcatcccagagactgattgttccaagtgcagatacaacatttgacgaatgcaagacagctgatgaagttgcagctaaacttggtgaattaagcaactctgacaagattggtgttcaggccggtacaacaggtcagtattacgttgaaggcagcgatgattgggacttcccgggtcttcctgctgaatgtgtaacttataagagcggttccctggctgttcaggatatgttaaatggcaacatcaagtatgtcatcattgatgctgctcctgctgcagcaattacagcatctatcaacgcaatgcagtaatcttttataacagatgggcctacaacccatctgttatgctgtacgagcctgaaaggataaagaagagtcattatgggaaattttgatcagaaagttaacaagtttatagagatattctgggagcagaatggctacaacaaggtgcttcagggtctgcagaacaccctgatgattgccattgccggtctgatcatcggtattattatcggtacgatcattgccactgtccgtgtactcccaaaatataaaacattgccgaaggtgctgaatgcgatctgcagcttttatgttgcattattccgcggtacgcctatggttgttcagctccttgtcttctactatgttcttttaccgattatcggtttgaagattacaggtgttcaggtggcgatgatggtctttggtttgaacagcggcgcctacatatctgagattatgcgaagtggtattcagtctgtagacccgggacagatggaagccggacgtgcagtgggtttaagttttggtacgagtatgatcaaaattgttatcccacaggcagtcaaaaatattctcccgacacttggcaatgaattcatttccctgatcaaggagacatctgttgtcagttttgtcggtgcggccgacctttatgtagcatttaactatatcggcagcaacagctatgaatttatggttccatatcttgtcatggcattgatttatatcgttcttgtgctgattatttcattattaatcaaattgatggaaaggagcctgaagaagagtgatagacgtaattaatcttaagaaaagctttggcagtgtcgaagttttaaagggcatcaacatgaccatcaataaaggcgatattgtggcaatcatcggaccatcaggttccggtaagagtacatttctccgctgcctgaactgtatggaagacccgacatcgggacagatcatcttcaacggggtggatattgcagatatgaaggtcgatatcaatattcaccgaagaaagatgggcatggtattccagcacttcaatcttttcaacaacaaaaccgttcttgagaatattatgctggcacctgtttatacccgttgtcaggaactgaagaaagccaaacgtcataatcgtctggcggcatttggcaagaaagaacagattcctgtgacaaccaccaaggagcagattaagaaagaagccagagaacaggccatgaatctgctgaaacgtatcgggctggaagataaggcgaatgtctatccttcaacactgtccggtggtcagaaacagcgaatcgccattgtccgtgccctggccatgaatccggatgtgattcttttcgacgaaccgacatctgccctggaccctgaaatggtcggagaagttctggagctgatgaaacagctggcagaggaaggcatgaccatggtggttgttacccatgagatgggattcgccagagaagtggcttccagagtcgtcttcatcgatgaaggtgtcatcaaggaagaagcagagccgaaggaattcttcgccaatccgaaggatgcgagactgaaggaatttctgtcgaaggtgctgtaaaactgaatttgaagtgatataagacaggccgtccggtcagcgaagtgctgactgggcggttttttgatgtttcgggaatacctccgctgatgccatatgatatattagagacaacaaagaacaaagcaaatatatttttagaaaacggaggagaaaaaatgttctggattttagtaattggtatcgttattgtttattgtgtattaaaaggggaagataattccggcagcagttctaataagcgttcaagcaccacaacttcaaaagctcaagcagctaaaacattaaatgtaccgtatccgtatagcacgattaaaagaatggaagtaccggtatacatctgggagaacggaatcaacaataaaattgcgacggatattttggcaaagaaaatcatatatgatgaaggaaatcatctgcttgtattacattgtggttttggttttgaaaacagaaataattttgaaatgcattgggagaatgcggtgttctatgatgctaatggaagaatggttgatgtgcagcataaagggtgcagaggaattgtgccaaagtatgatgagttcggtgaacatccggagacaatagtagagtatgagttagattagttctgagaggcgagtgtgaaaattcgcctctttttaggtttgcgcggataatgagcaaagctcatagtgagaaaataaggctttccaggaatactcccacgtatgcaatatgatatattagagacaacaaagctattacagatacgtgtttagaaaaaggagagtatatcatgacaaaagcagatgagatgagaaagatggcagcacagaataaaaaaacaaaaactgagaaagtcgatgattatgaagaaacattaaataaaacatatgctaagtttatatgtacagtagaagactcagcaaataaaggaatttctaaaggatatgcagcggaaattccaaggatgctggttccggggaagtatacttttgaatggaaaaacaagggacttttcacagattattatgttgcgaaaatgacttctttaggtgaacgttttttgaaagattttaaggccaaagcagaaaaggatggttttcaaattgaatataaattaatgtattcaggtgtggaacatacatttggtgaaaaaatttttaagaagaaaaattcagcgggttatgtgtatacgcctacagttcaggtgttctatagattataaaaggaaaaggtgaataaaaatgttctggattttattgattggcatcattattgtttcttgtgtattaaaagaggaagatagttccggcagcagttctgacaagcattcaagcaccgtaacttcaaaaactagagcaactaaaacattaaatgtaccgtatccgtatagcgcgattaaaagaatggaagtaccggtatacatctgggagaccggaatcaaaaacaaaattcctactgatatcggaaaaaggaaattagatatgttgagggacatcatctgcttatattacatagtttttatcattcctttcgcttcgctcaaggcacaaacaagttatgaaaaatgttgtatccctccgctctttgatttataattcttgtatattcatcaaggtatgggaaaattgcagtaaaaaattctgatggtacagtgaaaatgtatcaggcggcccaaaagtattttgaggcattaaaatcggcatcatcagataagtatttagaggtattgaaagaaaagttagatgtattgcagggaatataatcagagcagtacataacggagattttttacatatattgggaggcggcgcagtggcaagacaaaaatggaatctgaatacaatttatatatcagaacggctgaaggcgtgtttgcgtccggttacctgttgtgcgctgacaacggtggtggctcccatgggatacggaaagacaacagccatcaactggtttttggatgaacagggaaaaatggatgcactgtgtctgatccgtatcagtgtgtattcggacaatctggctattttctggaaaagtgtacaggtggcttttaaacgggcgggttttgattttctggaggattatgcctgtccggaggatgttgcaggagcaggattgctgatagaggatatgtgtcatgaattgtcgaaaacgggcagttgttacatttttattgatgattttcatctgttgacggatagccgtgcatctgcttttttgtgtatgcttgccaggcgactgtcgggaaatgtccatttgattgttgcagggagaaatcaatttctttcgtcggcagatattttgtgtctgggcggcaaagtttaccagattggtgtagaacagctgcgactgaatcgtaaagagcttgcggtttatgtgaagcgctgtggaataaaactgtctgagaaacagacagaaacacttttttattccagtgagggatggttctcagcagtttatttgaatttgcagatatttttggagcgaggcgtgctgccggatggggcttcggatatttatgcggcatttaccagggcgatgattgaaccgctttctgcaaagcaacgggaatttctggctgttatggggattgcggacgagttttcggcagaaatggccgtttttgttacagaagatgaggaagtaagagccatgctgaatattctgactgagcagaatgcttttgtgaaatgtctggcagatggtgtgactttcagatttcatcatatgatgaaagaatgtgccaatcgggtttttgcggcgttggatgaagaaaaacaggcattttacctgaatcgttttggcctgtggtatgagcagcacagtcagtatctgcatgccatggacgtctatcgaagaagtaaaaattatgatgcatttcttcgtgttgttaaaaatgatgcgggaattctgctcgcttcactgaatgcgcaggatgttatgaatgtgttggctgaatgtcctgtttccattttgaaagcacatccattggcgattctggtgctgatgcgcagcatgtttaactggcgtctgattccgaagatgatggaattgaaagtgcttttgatggaagtggtggaggaaaatgcagcgctctctgatgaggaacgtggcaatctgttgggggaatgcgatttaattatgagtttcctttgctataatgatatcggagctatgagtcagctgcatcgaagagccagcagccagatgtccagaccggccatcagtattcagaacaacggcggctggacctttggatcgccttctgtgctgatgatgttttaccgcggtccgggacagttggaaagtgagcttgcccagatggatgaatgtatgccgcattattacaagattacctgtggtcacggacagggggcagaaaagattatgcgggcggaagcagcttttgtacagggaagatttgcggatgcacagattgagctggaacgggcttatgcacagattgaaggaaatggccaggaaaatatggcgctttgctgtgattttctggcatggcgactggctctggctaaggaaatgaagccgcattgtagtctggagaggcggcgcaccgaattactgcgccatcataatgctgcctggcttaatatatggagtagcatcagtgcctattattatgcgctgttgggtgagtctgagaagattcctccgatatttggtgaacacaggctttcggatatcaatatgcttgccccgggaagaccaatgatgctgctgattgaaaatcaggtttatctggcacagaaaaattatgcaaaggtgattggccgcagcgatggacagctttctgtctgcgaaggcatgcattataggctggtggcgctgcacattcgtattcagacagcggctgcttatgaagccatgggaaaatggcaggaggcggagcagatgctgacgcaggccattctggaggcggagacggattatctgatgcttccgtttgtggagaattatcgttatttgaaaaaacttttactgcgctgtcagaaacaggaaagcctgtttgtcaggtatctgatacagatgggtgaaatgtatgagatgcggcgggaatgtctaaggaaagaggcacatcgcccggaggtactggctgtattgacagataaagaatatgaaatggtgctgctcattaatcagcatcaaacgaaccgggaaatcgcggagaaaatgttcctttcagaaggaagtgtcaaacaatatgtcaaacagatttattcaaaacttcagattgaaggggataccagaacaaagagaaagcagctgttacagctgttggaagagaattcctaactattggtgaatagccattgcaaaaaatccattgtacaatgtcggtacagtggatttttctttttctacaaagtggaggtgcgttatatgtcatatgtaattattgggctgattattgttgcttgtattattcattcagttttgaagaaatcaaaagagactgctgatcaggcagtaaatgatgcgattgtgccgggagtgatgaatacactttttgatgatgtgcagatgcatccggaagggcatttactggatgttaagggatcgaatattccgctgcaaacatatagctatcttaacagcagtggcaatatttgttttcgttatcagggacatccggcagagttgtgcagtattactttaacagaggtgaatgactatattgatgagaacaacgatatgcggcagacaaatgagcaggagatttaccggggacagtggatgtgctgtgaacttggggagacatttcctaccggttttacattctggccgagaggcaaactggataaaatcttccggacaaaaacgattaaaaccgggtatgaagcttttgataaacggtttaatctcagctgtgataatgaggagtgggtgatgtattttctgaatcaggacagaatggcccggattcttgaactgacgcagacggcctttggagaatttgctgtttgtctgcatggggatggaaagttggatctggcggtgcacagcggtcatcatttttttgaggtgggaagagacagaaataatccggaggcattgaaacagcgctataccagggagttgaaatggtgcagggatatgctggatgtctttatttcctaatgcagaaaaatgctccttccgggaacaggtgcgtccttagtctgtgttatattaaagtcacaaaagaacaacagaaataaattttgcgggtgagccgcataaggatgaatctaaacggaggagatatacaatgagtttttgtgacgaattaagaaaaattgaatgggaaaattcatacagcaataagaaggaagaaatcattcatcgtgaggttgaagggctgattacgggtattaaggtactttcccgtaatgcggaaagggatggcaagcggaatttaaccggatattatgatcaattttattgggatacaacagattactttattcaaccgtctgtcagtgaaacgggatttcagaggtatacaatgctttctttcttgaaaggctattcacagtatgaagcgatgaatatacgacaggaaatcgttaagagacttcaccagcgacttgcggaaatgggatacagaaatgttcagcttcgtattgacgaggtcgcgcagagagagaacaaaaaattttttgcctcaaaaacgggcgtgacactgtattatctgtggctgaatatttcatggtagaagaacaagacaggccatcacattcatgaaatggaaatgtgatggcctgtttggaaatgtaagggtttaataagattctttcggttctttattctccatataaaataccttgccttttggccggaaaggcagtcgattgccattgggaatgagaaaggcatgtttccgtcggatttttagattatcttcgatatagccgtctgtgattacaagaatcgggccggaaggtgggaagtctttggctttttccaaagcatcaattccgggctgaaggattgtgccgcctctgccggtgatttctactctgcctgcgatatcttccggggccatgtatccggcatcggtggcctcggcatcacagaagattatccggacaaaggggacgtccttggcagcagcgtagctggcagcggcacccaatgctaagccaatctgtgcagaacacatggagccggaggtgtcgataacaacgccaaaagttcggcttttcagctccttttcctgaagaatatagcttggccttggtatattcggtgtggaaccctggcgtctgcttggtcttacataggtgcgatgcttttccagaggcgggaattgctcatcaaaccatctgcccagctgcacttcccaggggataggcggcatggaaagagcgcggatttcttcaataagtccggccggtagatagcctctgctgtgggtggtgtgatagtcaagtccttcacgcagcgcgttcttgaaaaattcatccagactgatgcctttgtgtaggcctttaaatctgggaccctgatcgccaaacagatcgccttttccgtatcctctgaaagtggcatgctttttgaatttccgcatttttttgacaataaggtcataaatggcttccgcagacatattgtgcaggctttcatcatacagcagatcttcctccggcatgctgccgatatgcatggcaaggagccaatcattaatgacataatcgcaggcaatattccaaagatagtgatcccgaccctggcatcgttcatggtgacagagtccggcatgcagatattcatgggcgaggacgaatttccattcctcaagtgtcagacaacatgacggattggtatatatttctccgtgtactgcatctacagcagcaatgtgtatttcatatctgcggcataaatcaatgtcttcaataatcttaaaagatgaggccaggccgccaagaagcggatagtgagataagaaccattcagaggctttggaaattacggtgtctttcttgtttgaggcatcgtgtccgccggcatggatgactacttttttgatggagtgattaatggcagctgcaaaagtttcggtatattcattttgttcaccttttttatagacgatgggtgaggagatgccaaacatatcacatgtgctggatgtatttaaaccgtatgtctgttttggggatatgccttctgtgtcaagcaagtattcgtaaatctttctttcgtcattcagtttgatgggatagaaagctgacgggtcctgaaagagactgccgctaaaaccgatgtccgtcagaaatcttgttacatagatatcgcaggctttattccatacaagaggatagatttctgcggcagaaggcattttgtttttgtcaaaatggccaaaagcgaggtggagaaggtgatgggccatgacataggcccattcagcggcattcaggcgggcatgtatattgacagaaatctctccgtttttggtgacgcaggccaaactgctatgattggataaatgtgcatttctgactgcaattgttccatctaactgggaaaacagcgggtgtgattggagcaggtcaaagccggcataaatgggttttaagccatccggcatattgttttcattgtaataaaattttcttctaaaataagccataaggatacctttttattgcatattgattgcggaataaaaattatttgccgttgaccagtcggggcagatcacggatgacttcaatcataaaccagtcagggagagcggcgttgtcatcggaagcaaccaccatctgggcaatttcgaaattgatagtagataaatctttgatcatacgcttggcacgataaacgaaagagagcatattgccggaaatatcctgtttactttttggcagttcggaaatgagccttgcacggaaggactgtgcaagaaaataaagaatatcccggtcttcagcttttgaaggccattttgttttttcagcaataatatcgtcaagcatatgatgattggcaagactctttatgtaagcaagaaacatgccggcatgggaaggggtaagacagccatagacaagcattttcagtacgtggcttgaaagttctcttttaccggcaccgtattctgtcagggcatcactcagcatatgccatgatcttggtgtagagaaaggctcttctgttttgggtgcttcggaaaaaagatggtcaggccgctggataatgtaatcaatgacccatgggtgaagctgactgcgctgtgcccacttgatccactgtcttgcatcagctttcatctgaacgtggaacattcggttgatcagggcagaagacatggttttgacaatggcagagtcctgaattcggtttccggcaccaacgacaatgctgccttctgggaggtgatattcgccgattcttctttcgtgaataagagaatagaaagctttctgaacttcttgggaacaggcattgagttcatcaagaaataagacataaggctctttgcgagcaatcattttcggaggaagaaattcggaagtttcacctttgatctgcggaataccgataatatcttccggtgctagctgactgccgagaagcgatacacagggcaagccgatttcagatgcaaattgttccacaagtgcagattttccgatacccggtgcaccccagataaatacaggcctgcttggagcaacattgagcaatatttccagcaggccatcctgtgtgacagtaattggtaaattcatagaatcctctttctggtgttgtttcaggcagtgatttgactgcgctgctgttcattatagcgtttcttttggttaatatggcggactttggctcttggataatatttgttgcagtgctgacagtaagtcttgtgctcggcagcacgaccctttgaacattcgccgcggcagatataaaatttgcatggtgtttctctgtatttgctcatggtattttcctccgggggccagttaaataattgtcttctggtctgataaaatgggattgttaggtgttctttgattaaaaagtatagcattgatgaatggaaaaaacattgaactgttagttgaaaatgatagaagctggaaatttgagtggatattcaagcaggccatcacatgtggaaatgtgatggcctgcttggaaatgtaagcgttttacaacagttttataaacttatatttgactttgagaaattatagattatgttttttcaggacatccagtacaaaatctatggattgttcacagagagcagcaatttcttctggtgatttgttttgtgcatgataggaaagaattagggaagtgagaagtttgtcagcacgttccttttctttagtaatatcttgttctgcttgacgtaaaccatcttcaaacccttcttcataactaatctctttctcggaagcaatgtgtgcggcactatcatattctttgaataacatatcggtaacctccgctctgtgttcacgtaaaatatcggcgaggatgtccttttcaatgcattcagtaattgtttcttctattgcgtcacccagtgaaagcccatcagaaatcttttttcgaagcgcagccacgaataatgaatactgatggagcagcgggcagcgttccatgatttgagcgctgtgtccggcattgatattaatcatatgggcagtaaattctgcggatgaaactttagaagcatttgttccggccatgctgtctgtcaatttgaggattacttcgtctgcggctttctttaatccgttataaaagacataatagcgcggaacaggaatagtcagtaatttactggaatacatgtccagacgattcttttcaataaatttctttaatgcagcactggtgtaaatcaatccgcgaagcggcatattcggattataagaactttgatgctcaaacatattcagattccagtcaagcaggaatgacaaatcatttttcattcccatatataggaaatcgttcatggtataaaactccatggcatccgtctcttgataatcactgtcgttaatggcattgtaaagcgaaagcgcagcttctttattattgaaaataaatcggaaaaggctgtccttgtatttacggttgtaataggtattttcctgcgacatttatagattctcctttaattgtactcaaaactcaccggtggtgcaactattatatatcgattgaagtaaaaagtttgtcgcaacgtgtagatgaaaaaatatttaattttgatgaaaataagcccctttttatttatatgtgaaatgttataatgtgtaataaagaaactatttaaatcatagatgggggtataatatgagaactgctgttgagaaagctttagaggaacttgtggatgtagttccggcaggcgcagatggtttttattatcagggtcaggagctaaaagataaaaagtgtaaagaagtagaggcatttaagggaattgacactttacataaattgtatgctgttttgagaaaatcctggagttccattactgcatataagtcatgtcagagcgaatgggtttcagaggacccttcttatggtcagtgtgcaattactgcaacattggtatatgatatgtttggtggaagtattcatcgaataagagtagagggcggtggaacacattattttaataaaataacaggacagtatgtagatcttacacgtgaacagtttgacttgtataatattgaagttgcatatgaaccaaatgaaacaatgcaaagggaatattgctgtaaaaatccggatacaaatgcaagatataggcaattgcagagaaatattatcgcatatctgaaaaataatgaagattaaatgtagattttatgaataagttgttttactgatggttaggaagcaaaattatatagagtatgttatgctaatactatccacagcaaatacaaatataggagaggaggaatgaaaattgaagtattatatcagtgatttacatttatttcatgaaaacgccattgcctttgatcctcggccatttgcgtcattgcaggaaatgcatgatacgattttaaagaactggaatgaccgtgtgaccaatggggatatggtatatattttaggtgatgtgagcatgcgcggcaaaaaggaagagctgattgcattcgtggctcagttaaaagggcgtaaagtgttgatcaaggggaatcatgatgacgtttctgattaccgttatcagcagttgtttcatgaaatctgcgattataaagaaatgcatgacacgattggtaaggagcattatagtctggttttgagccattatccgattttcagttggaggaacatgggacgaggaagaattctcttgtatgggcatacccatgagagtgaggaagacaggttttatcagaagtgtctgtccgagatgagggcgaatgactgccggcatgtctatgaagcggaagaattaagagcctataatgttggatgtatgcgggattatatgaattatacgccgagaacgttggaagaaattctgaattcaaggagtaaggtgtaaagaatgatttatttaagcagttttgcgctgagtgataaaaaggtgaaaaatccgaatctctatccttattcagtttttcaagataaggattgtgatccatttgtgttcgcacctatcacgattttgtatggagataacggatgtggaaagtcaacattgctgaatattattgcacagaagatcaatgcaaagggctatgagacatatgcctacggacagtattatatacaaaattatgtggaagaatgccgctttgatacaggcgaagatgacactggaaggaatctatccattccggcaggcagtctttacatgaaaagtgaagatgttttatacgagattaaaaagatccagcaggaagaggcattggagcagggatatgtctatgagcaggtgcggaggaaaggactgcgcaaagacgtggcacaggaaatgtttcgcagcacaaatggaaggtcatggtccacaatgcagatcctgaaatttgcccaagagaaatattcaaatggtgaaacagccatgcagatgttgacggacattctggagccggataatctgtatcttcttgacgagcctgaagtttctctgtctccgcagaatcaggtgaaattagcagaggaaatcaatcaatgtgcacgtttcctgggctgtcagtttatcatagccactcattcgccttttatgcttggtacacttcaggcgaaaatctataatctggaatcaacagaagtagaagaggccaagtggtatgaattgaaaaacgttcggtatttttatgaattttttgataaaaacagaaaatattttgtgagatgaacaaaggggcgtatcattgtgatacgcccctttactgtatcaaaaagattcaatagattttacaatccctgcacatgttccaccagtctggatacaaatccagccgtaatatcatccttgtccagttcatgattaaattcaacgatatccatcgcctgaaccggcagccgtgtcagcagttcatccatcatcaggaagacgtcgtcttcattgaaaccttccggaacgggaacggagacgccaggcatcagtttcggatccatggaatcaatatcgaagctgacatgaacagccgggcagtggctgagatagtcaatactttcgttcagacagttctgaagaccgtgttccataatataatcccatttataataacgaatatggtgttctttgagaatttctgcttccggcggatcaatgtcacgcaggccaagcataacaatgttgcctgattttaacttgatgctgtcatccagaaaatgtgtcagggaaggttcaccaagtcccaggagtgcagccaccggcattccgtgaatattgccggtaaccgttgtcttgtcagtgttgatatccggatgcgcatcaatccagatcagcccggtttcgcctttggtataaacagatgtagcggatacagagcccatggcggcactgtgatctccggcaatcatcagagggcgatgaccggatgttagaatatggtaaccttgcttggcaatgccttcgcaggtagcgcatacactttcgatattcttcagattggcacggaaaggtccattacacgtgatttctggaactttattcatttgaagatttttaaaattttctgttaaatagtcgatacttttgattaatccctttgcaccgacgccgtagtgggtcggacagccgtataattcaaacatgattgcctccaataaatcaatgtctgtgatcgaatgagataacagacatttcttaagtttactgcactataacacgggtcaactggtctgtcaatttaatggaataaagcctataggacatgaaatgcataaaaaaatgtataaatatggaaatatacacttacattggaagtgagtcaaacatcatcctggaacataatatagtataaccccatttttggagttatgtcatgattttgaaagcattgtttgaaaggattccggcagtattgtgtcagggcagctgggatactgatatagcatccattgcaatgtgttcgaaagaggtaacaaataacagcctgttcatctgcattaagggtatggagcaggatggccatcaatatattcaagaagcggcagagagaggagcagcagcatgcctggttgaagagactttctggaagaagtcggcatccgtgcatggaaatctgaagcaggctgagaaaaagacatccgcatatgaggaactgaagctgcctgagcaaatgacgattgtatctgtgcaaaatacgcgagaagcagcagcctgggcggcagcagctttttatcgttatccgtcaaaggaattaaaagtgatcgggattaccggcacaaagggaaaaacatccacaacgtttatgatccgggatattctggaagccgctgggtataaaacgggccttctgggcacaatagattatgagattggtgaagagaaaaaacgggcggagcggacaacaccggaggcgattgatattcagcgttatctgagaaaaatggcagacagcggatgccgttttgcagtgatggaagtctcttctcaaggattaaaacttcaccgctcggatggcattttatttgatgtgggggtttttacgaatcttggaagagatcatatcggccctaaagaacataaagatatggcggaatatgcgcattataaaagtctgctgtttcaaaagtgctgctttgggatcggcaacatagatgatccctattatagggaaatatttaaagatgcctcatgtcaggtttgtacctatagctgtaggcaaaaagcggatgttcaggcttcagatataatgttagtcaaccgtaacggacaattaggtacattttttaaagtcaatggggaagaatatgcagtatcagcaccgggggagttttctgtttataatgcagtggcggcaatcaccgtatgcagacactatggtattgatcaggagattatccgaaaagcactgaagacaatccgtgttcccggaagggtggaagttattgacaatgacaggggatatctgcttctgattgattatgcccataatgccatgagtatgaaaaatatactggagacgatgcgccggtatcatccgagacaactgtgggttcttttcggatgcggcggaggcagatcagcagcaaggcgcagagagatgggctgtgtggcaggaaaatatgcagactttacagtgattacatcggataatccaagatatgaggaaccggagcggattatgcagacaattgaggagggaatgaaggaaacaaagggacaatatcaaatgatggttgatcgtaaagaagccatgcgttttatgctggcacagggacggccgggagatattttgatcctggcgggaaagggccatgaacagtatcaggagatcaaaggagactatttgccgttcaatgaaagaaaaattgcgcaggaaatcctggcggatcttgactaatacatcattttcgaaataacgatgtatttagaaggctgcagaaaaagttttaatggaggaacagagaaaatgaaggcattgattttatgggggatcggtatgtcgggcggaatcgcagtggcggcgggattatttaccttccttgtaattacgggaattccccatcggttaatgacgataactcacacgacagcctatggtggatggtatgaatggatgtttgtgctgggtggtgcgcttggtaatgcagtctggctgacagatacagcagtaaaaataccggcagggatgtttctggcaggtgcagcaggccttctggtcgggatatttatcgggtgtctgatcggagcgattgcagaggtgctggatgcgttgccggtgtttttcaaaagaatcggtatccgtcagggcatcggtgtcgtcattttctggatggccgtcggcaaaacactgggggcctggatgtggtatttcatattgacataaatgccagtataaaataaaagcaggtatagattgaagaatatgaaggcgggatactgattgatcagaagaaaggtgtgaatgaaacagatggaaagtgaaaagcagacaaaaaatgaaaaacagacaaaaggtgaaaaacggatggaagatgaaaaacaggctgccaggaagaggcgggataaacgatataatgattacgtgaagcaggtaactccgaaacataactgccttttaaatatgctgaaagcatttgttagtggaggcttcatttgcgtcatcgggcagatgttttcggattggtacggcagtatgggacttatgaaggatgaggtgtcaggatatacaacgctgtcgttaatattgatcagtgtgatcctgacatgtctgaactgggtggggcccatcacaaaatttgccggtgcgggctatctggtgccgattacaggctttgccaattcggtggcagcatgtgcactggaatttaaagctgaaggagaagtttttggtgtgggctgcaagatatttaccattgcaggcccggtgatcttgtacggcattgtcaccagctgggtactgggagcaatttattgggtggtgcagatgtttgcttaggataatatcagggaagtgcgccgaaatcaggtctgtagatgaagagaaaacttgacaaaacagccgacttgttatagtatacaaaagaaactttgacaattgaatagatggattcaccataattttttctttaagcgccatgtaccggagtgatccggttaacgaggagaagggtgatcgaagattcggcggatgccctttcgtacagcccggtgcgtatatattgacaaatatgcaggcaactgcaaaacaaaaacaatataacgggaactgataagtcatattttgtaactgttcagagccaagcaaaatttcaaaaacaggtataaaatgcgtagcattttggaggttggctctgaacagttaccatattttaaagaatgaaatgacgaaatgattataagaagtatcggaactgtgcagacagtctgatacgtaaagatatagatagtgaggaaaaattatgtgtggaatagtaggttatacaggtaaacagagtgttgcaaagcagattcttgatgcattggaactgctggagtatcgtggttatgacagtgccggtatggcaattgttgatgagacaaacggccaggtgcagatccgtaagcgtgccggaagagtagcagaccttgaaaaggcatggaaggctaatccggtgaatggtatttgcggtattggtcatacacgttgggcaacccatggcggtgtcagcgatgtgaatgcacatccgcatcgtgcaggacgtgtcacattggttcacaatggtattattgagaattatgaagagctgaaggatcattttggcctggcggatgaactgatttctgatacagacagtgaagttgttgctgcggtattgaaccgtttttatacaggtgatccgcacgaagcacttttccagacagtgaaatgcctgaaaggtacttttgcccttgtggttatttttgatgatatcccggatgtgatttttgctatccgtaatgtcagcccaatcgttgccgcttatcgtgaagacggtaccatgctggcatctgatgtggctgctcttggcggtcaggcaacaagctatatggtagttcctgaatatcacgtcgttgaactgcatacagatgacatccgtgtttataatatgaagaatgaactttgcgaggcagaattcctggatattgactgggatacaacaagagcaggcaaaggcaactatccattctatatggagaaagaaatcatggaacagccggaagcaatcaaggcaacactggcacctagatatgtggatggacacatttctctggaagcagacggtgtgccggatgatgttctgaagaactgtgaacgtgtctgcgtggtagcatgcggtacagcaatgcatgccggtctggttgcacagtctctgatacgttcaatccttcgtatgcatatggatgtggaatacgcatctgagtttatgtatatggatcctgtcattgatgacaagacactggttctggcaatttcccagtccggtgaaaccattgacacactggaagcgctgaagtatgcaagaagccagggtgcgaagagtattgcagtgatcaatgtaaagggttcttctatcgcccgtgaaagtgattatgtcatgtacacttatgcaggtcctgagattgctgttgcaagtacaaaggcttatacaacacagatggcagctttatttgccttaatcggccgtatggctgttgtgcgaggtgcattcaatgaagaacaggaaaaagcttttgttgatgcattgatgcaggctccggatgccattcagcaggtactggacagaaaagaagagatgcatcacattgccagaggccttctggaagccaaagatgctttcatgctgggtcgtggtcttgattatgccatccttcttgaaggcgcactgaagctgaaggaggtttcttatattcatacagaagcttatgcatccggcgaattaaagcatggtacaattgcactgattacagagaagacaccggttgttgcccttgtaacacaggaacgtgtccgcgataaggagctttctaacatcagagaggttcagtcccgcggtgcaagtgttgtggtactggttaaggacggcattgatctggcagatgcagattatacacatgtgttcacgcttcctgccatggatgatgtggcaatggcattccctgcctcggcagcattgcagctgctggcatattatgtatccatggacagaggtctggatgttgataagccaagaaacctggcaaaagttgttacagtagaataaagtgtttagagcccggcataccggccaatggtttgtcttttggcttgaaatcaattttgtatggtgaatctgtcttatgtcgaagtaaatatgtcaaagtaaataaaaggaagcgatcagaatctgcggattttggtcgcttcctttttggttggatgataaatgtgtgcaaaaattatttcagatagtttcgacagatcgcatccagtacgtcaaaataattttcaaatgttttccggcagcaaagcgggttactaatgatgatacccggtgtgcgaagtcccgtcagtgagaaggccatggccacacggtggtcgtcataggtttcaatggtggccgcatgcggggtgccgggttcaatatagatatcattgccttgaattgctgcatggatacccatacgggaaagattttccacgatcgcagccatgcggtcactttcctgaagacggatatggccgatgccgcggataaaagtcggactgtcggcaaatggcgcaatagcagccatggtcaaagcctggtcggaaaagctgctcatatcgatatcgatgccgtggagtctgccttgtgcaggaccggtcagacggataccttccggtgtatcctcagcactgcagcccattttctcgaaggtgcgaagcagtgccacatctccctgcagggaatcaaagtgaacgtgtcggacaaggacattgccgccggagaggacagccatgccgtagaaataggcggcagctgatacatccggttcaatctgataatcctgtgactgataagcggcatttcccgggattcgccatgtctgatcgtcagaaacagaaatttcgacgccaaactgacgcatcatggcggtggtcatatgaatataggaaaaaccatgattgccggtgatatgaatggcaaaatcatgatccatcatcacagcggccatgagaagggcacttaagaactgactgctgtcgccgatatctacagtggcctctgaagcggtgataccttctgaatagatggtaaaaggaaaatagccttccttttcatggcagtcaatgcggcagcccagatctgttaaagtgtttaaaagggcagccatgggacgcttcttcatctgttcggaagcatccagatgccagacacctttggcacagcccagcatggctgtcaggaaacgggcagcggttccggcacttccaacattgatagcggctgtttctttcgggatgcggccgccaaaacctgtgacgcgaacggtatgggccggttcatcaaccacgacatcaaaaccaagatcctttaaacactgcaggaagtgcctggaatcgtcactgaacagggcgcctttcagcagcgtttcaccattggcaagggcagccagcatcagagcgcggttggtaatgcttttggaacctggcgcatcgatggtcagctcaaaaggatgtgtcggatggctaaaaatcggttgtacttcatatatattcatgggaatcctcctggatcattttaataggatagttcagaacggtgatgaccggcgctgaacagtaacattgtaccacagaattttgggaaggggtatgtatttgtattgcaattttatacaaaatatgggtataatgataatgtatgttctgcggccggaatgaattggtggacaggacagggagaatgaggcacagcagatcaatgcgaacattcgcccatagaatccgtaagtatgaaaagaggataagaaatggatcataatttataccatgaaatagaagataaggcacagattctagtagattctctgccatatatcagagattttaaccagaagattattattatcagtttcggatgcagcaatatcctgaccgatgaggaagaacaggaagttatgcgtgacattgcgttgatgaaatccatcggtatgcgtccgattgttgttcacgataccaagatgggacatgacaaattccgtgagaacaaacgtattgccaagatgattgaattctgcggggtaaaggcagtgggtatctgcggtatcgatctgcagactattcatatgacattggacaatgattatattccggttattacgccgaatgatattgacaatgaggacacaccgattctgccggaagaggctgcgaaggaaattgccgtgtcaaccggtgcagagaaggtgcttttcctgggcaaagaagacggcatcagagatgatgaaggccatattatttcacagatgacccgtgatgaggtggtcaagatgtatgtagcaggaaagtttgagggcagactgcttcagaaagtgacctatgcccttcagatgattgagcagggggtgccgagggtgcatattctgggatcaaagatggcccatgcgctgttggtggagattttcagtattatcggcgtgggtacagtgattatgcctgacaaagaacattattatccacatgaattgaagaagagagcggccgctgcaaagtaatatcggacggactttgccgggattatacataggacacaaagcgtattgataagcaataagagaagctgatgcacagagaataaggcatcagcttttctgtgctctgaatttatgaaaatagatatttttcaaggaaaaatcataagaaaaaacagtcggaaaatgtcagtaaaatgtatgcgacaaatggtgaaaatcgtatgttgacattacgtttcattaaaatgataatatagtgtgcaggaggcggaaaaggccgctgacgcaaagaaaaagtgaaatgaattttagatgtgcatacacagaaaggatatagagatgaaggaaagaaacagtacggcagccatcagtgtgaaggcacctgtgatcggactgccaagggcgatgctgtatgatcgttatgaagtgttgtggaagtcatttttttcagcgttgggtatgaagggtattgtcagcaagcctaccaataaagcgatgattgaagcgggctcagcactggcaattgatgaagcctgtctttccaccaagatttatctgggtcatattcagtcgctgatcggaaagtgtgattatattcttgttccgagaatcagcaatttcggtctgcaccggaatatgtgtacgaagtttgaatcactatatgacgttgtctgtaatgtgttccgtaatacggatcagaagtttgttgcctacaatgtagatgcccttcagaagattgatgaagagaaggcttttgtggatctcggaacagctctcggctatgataggaagacggcacagaaggcttataagagggcgaagaggaacgaaaatgaagactggaagaagaaggttcgcgaagaggaagctttgtataagtcacagggtattaaggtattgatcgttgcccacagctatgtgttaggcgatgcttatatcggacagcctgttattgattacctgaagggtatggaagtgacgccgatccgcgcagatgttgtagatcgtaaggaagcactgaagcagagtgcgaaggtatcaaagacgctgaagtgggagctgagccgtgaactggtgggcagtatccagatgcatcgtgacaaggtggatggtctgattctcctcagcgcatttccgtgcggaccggattctatggtgaatgagatgatcattcgtaagttcaccggacttccgattctgaatattgttttggacaatcaggatggtaccgccggactggagacgagacttgagagcttcacggatatcctgaagctgaagaagggggtactgtaatggacataggaaaaaagaaggtgtcatttccaatggtagctaattacaacagtgtgattcgctactttgtggaatgcggtctggacgcgcagtttatcatgccgccgaagatgacaaggcggacactggagataggttcgagatacagcccggattatgtctgtgcaccttttaaaagcacattaggaagtatgatcgatgcactggaagcaggtgcagataccctggttatgaccatgggattatgccgcctgggttattacggcgaacttcaggaacagattatccgtgatctcggctataattttgagatgatcaatctggcagaatatacaacgggcaagaacagagattatctgaaggcgctgcgtcggatcaatccgaagatgagtctggcaaagtttacactggccgctgcagagggtctgaagatggtggaatatatcgatgagattgaggcagaatactacagaaattgcggttttgaactcaacaaaggtgactataagaaagcgttggacagattttatctggcgatgaatatggcgaagtccaagaaggatgtggaggaaggctatcgcgaagcaaaacgtgaatttaaccgtattccgatggacaagccggagcagcctttaagagtgggtatcgtcggagaatattttactatcatggatcctttctccaatctggatcttgaacagaagctggcggatatgggtgtggaagtgcatcgctggatgaatattaccaatcgaaatctgcactataagggacagaagaatcttggcgttcagattgccgaatattgtcagtatgagatgggaccgacatccacagccaatatctggtgtgcgaagaattatgcggtcaatggctttgatggtatcattcatgtgaaatctgcaggttgtacaccggagattgacgttatgccgattcttcagaatatcagtgcggattataagataccggtattatacctgacttacgattcacagacaagtgatacgggacttgagacccgtgtggaagcattttacgacatgataagtatgagaaagaaggttgtctaaatggaagaggcatatcttggtgttgatataggttcgatttcgaccaaaggtgttattatagataaaaattacaagattctggccagtgaatatatctggacagaaggcgacccgatgggcgcagcgagaaaactgatcgagcttctggagaagcagtttgacaaagagaaatatcagatcgtggcaacaggtacgacaggcagtgccagaaagctggtaggtgccatgctgggcgcaaccatggtgaagaatgagatcacggcccatgcagtgggaacaactacactttatccggatgtacggacgattcttgagatcggcggacaggattccaagattatccttgtggaaaacggcgttgctgtggattatgcgatgaatacgttgtgtgcagccggaacaggttctttcctttcaagccaggcaaagcgtctgggcgtggaagtcgaagatttcggcaagatcgctctgacatccaaacaccctacgcagttggcggcaagatgtacggtttttgcggaatcggatctggtgcataagatccagatgggccataccaaagaggatattattgccggtctctgtcgttctgttgtcaacaactatctgaacaatgtgggtaaaggcaagaagattgtttcaccggttgtattccaggggggtgtgagcaagaatatcggtgttgtggaggcttttaagaaggcgctgggctgcgatatcatcgtggatgagaacggacatctcatgggtgccctcggtattgcgattttggcaggaaagggcaataagaagaaagtctttgatttctctgttgaagatatggtatttaagacaagagagattaactgcggacgctgtccgaataattgcgagatcatctgtgtatacagagatgacatgctgattgattcatggggcaaccgatgcgataaaggtgcactcaaagcgggcacacgtaccggtgtcaaatagcaaaaaggcatttctcttcattggggaaatgccttttgtatatttagaacatctggaagtatgtcctgtttattagtgatattccttctgcagggagaaaccgcggccgcgaacttcacggacttcattgatggtaatgaaggcgtttggatcagtggcacggatcagctcctgaagtttaaaaagttcacggggggagacaaccgtcagtacagcataggttggccggccggtataaccgccttcgatagaaaggagggttgttccgcgatccagatctgtctggatttttttgttgatttgctgatactccggactgatgatcttcagctgaatctgacgtttgccgttgatgagcaggcgatccaggataacggtgtaaagaacaaccagaaggatgccgtatagcacttgttctctgtccgaaatgaaaatctgcaggatgagtatgcagaaatcaaataaatacagactgacggaaaccgggaaaccgagcttcttctcaatgacaaggggtggaatatccataccgcctgtggaggcaccggcctgaataacaagcccgagtccgataccgatacctgcaccggcaaaaagggtggcaagcatcatgtcatctgtcagagggcctacacggctggacagcagctgcagaatgcttaagaaaaacggatactcaaatgtgctgaggattgttgtcagggcaaatgctttgccgaggacccaggcaccgagaaggaacatggcaatattgaagacatagacaaaggctgtgatcggtatatggaacatatattgaccgaaaagcgccagtcctgttgtgccgccggtgatcagattattcggaagaataaaaaaggcaacagcgacagtataaatcagattgcccagggaaatgatcaaaaaattgtgaagggtttttgagatgttcttttgcatgctgtgttactcctttgctgtgataaaacaaaaaaggaagatgaataaaatccatcttccttcaataaatatagtgataaaaaatattccgttgtctgaatgcgtggtataatagacacatggaaaaaccttcttttaaacaagtaatagttattaatggatttagtttacaccaaaatagcacaaatgtaaatattatttttgagggagatggatgatgaacaagaaaacagaaaagaaaagaatctcaagttgcgatatatgtatgaattatacctatgatgaagattatgagtgctatacctgtgaagtggatctggatgaggatgaaatggcccatttcatgcaggatacctactataactgcccgtattttcagatgggggatgagtacaagattgtgcgcaagcagatgtagcggcacagggaatgaagattgctttaaagaaaagactgtccatatgatgatgcagatggttcatcatatcggcagtcttttggcatatacatcagaattatgcagtgcgcataaacaatatacttagagattgacgtaaagaacgtcgtggttcgtatatggcagaaacttgttcagaacgtcgttggtggccaatgtgaggctggaagtgttgatgcatgggtggcatccgatcaatggctgatcgacaacttcctgatccatgacaagctgaacatggtgctcgtgatcattcatcagtccgagaatacttgcagagcccggggtcagatcaagataggcttccatatattccggcggagcaaaggataatctggatgaattgatctgtttgcagaaatcccgtgtgacgaatttcttgtgtcccggcatcatcagaaggtagaacttcgtcttctgtgaattacagaggaacaggttcttacaaatctcgacacccagaaacttgtcaacatcctggcattcatcaatggtgttcatagcgtcgtggtcaatgcggacaaaaggtatgctcaattcttcaagaagatcgtaaacgcgattttctttctcgagacgctcatccgtaggacgtgtggtataaattgtaggatctatatgttttctgtcagtcatttaaatcgcctctttcttcctattaaaatgtattaatctatatcatggatactactatacagcgtttttttcaaaaatcaagaggcatattggcaaaggatcagataagaaaagagattcggaaaaaggatgaccaataaaaacgacattttgaaaagaaatgtgtataaaagaaacaaactggttctaccagtaaatggcaaagtattgagcaaaaaatactgtgcagggaaaataaaaaggtgtataataggcattacggaaatttttcggcacaacggaggtaaaaatgagcagacgatatgatacggttatttttgacctggatggaacactgttaaatacactggaggatctggcagatggtgtcaatgcagcgctgaagcattttggaagaccggagcggacattggatgaagtccgtcagtttgtcggcaacggcgtgctgaatctgatggacagggcagtgccggaaggaaaggaagcaaaggattttcaggcaatctatgagtggtttaaagcctactatgccgcacattcggaggtgaaaacacgtgcctatgacggaatacctgaacttttgaagcagctgcaggcagaacacttcaagatggccattgtgtccaacaagtttcatgacgccgtatgtcagctcagcagatgctatttcggagagctgcttccggtatctattggtgagaatgaggctgccgggatcaggaagaaacctgcgccggacacagtttttacagccttggagcgtctgggttccaccgttgaacatgctgtgtacatcggagattctgaggtggatgctgcgacagcccgcaatgcaggaatggactgtatactggtgagctggggattcagagagcgtgaattactggcatcatacgatcctgtagcgattgcagatcagccgtcggatatatgggagatactgaatcggtaagtggaacaggagcaactgtatacagtatgaagtatgaaattataaaacactgtcaatagcattgacattctattgaaatcacaatataatactaaatgttgtatcatgtgagattgataagcaccatatatacgaacataaaacaaattcaaaataaagtcttaggaccggaaaacagcgcagaacatgtgcgattgaaggcttatagcttatagcaaatagactatagagggagcgtaaacggatgatagagaagatacaaaaaagaaatggccagatggtggcgtttgattcagtgaagattctgaatgctatcagcagagccaatatggcagttgaagatgaggtgatggaaccggctgatctgtcttacctgacacagaaagtgtgcagtcagctgaacccggatgaagttgtcacagttgagcatgtacaggatgttgtggaggagacgttgatccgttttgattatgcgaagactgccaaggcatacattctctatcgtgctgagcacacgaagatccgtcagacggaatccgatctgatggatatttattccaagctgacctattccagtgccatggatgaagatatcaagcgagagaacgcaaatattgatggtgatacggccatgggtacaatgctgaaatacggttcagaaggtgcgaagtatttcgttgataattatgttttgccgaaggatatcgcagcagcccatatcaacggtgatatccatatccatgacaaggatttctatatgctgacagagacttgctgtcagattgacctgatcaagctgtttaagaatggcttttcaaccggccatgggcatctgagagagcctcagtccattatcagctatgcagcactggcatgtatcacgatccaggccaatcagaacgagatgcatggcggacagagcattccgaactttgattatgcgatggcagacggcgtgaagaagacgtatgccaaggaatattatacatggctggcagccagcatgcggctagaggcaggtattgatgatggacaggcagctgctatcattgcccgtgcgaaatccgagattacagaggaactgcgcattgccaatatggatgcctacggcaaagctttgctggcactgaaacctgaggaaatttcagaggaagatttgaagaaggcacatgattttgctgttgctgaagcgttgaagacgacagagaagcaaacccatcaggcaatggaggccctgatccataatctgaatactatgaattcccgtgccggtgcccaggtgccgttcagctctgttaattatggcacagatacatccgaggaagccagaatggtgatcaggaatctgttgacagctacagaggatggccttggcggcggagagaccccaatcttcccggttcagatttttaaggttaaggaaggtgtgaatttcaatccgggtgatccgaactatgacctgttccagttggctttaaagacttctgcgcagcgtttgttcccaaacttcagttttattgatgcgccgtttaatcttcagtattatcgtccgggtgattataatacagaagttgcttacatgggttgccgtacaagggttatgggcaatgtctacgatccgaccaaggaagtaacctgcggcagaggcaatttaagcttcacatccattaacctgccacgtctgggtatagaagcccatggcgacattgacaagtttttcaagtcattggatgacatgatagatcttgttatccgtcagctgatgcaccgtttcaagattcagtgctccaaggttgtcagaaactatccgttcctgatgggacagggtatctggattgattcagaacatctggatatggatgacagtgtagcagaggttctgaagcatggtacattgagcgtcggattcattggtatggcagagacattgaaggcactgacaggcaagcatcatggtgaatcagaagcatcccagaagctgggacttgagatcatcggtcatatgcgcaatcgtatggatgaagaatcccggaagacaggtctgaactttacattgctggcaacacctgcagaaggtttaagcggtcgttttgtccggattgatcagaagaaatacggcaagattccgggcgtaacagacagagagtactatactaactcattccatgtgcctgtttattatccgattaaggcttataagaaaattcagctggaggcaccttatcatgcactgaccaatgcgggacatatcagctatgtcgagttggacggtgacacatgtaagaacctgaaggcatttgaatctgtgatccgatacatgaaggagcagggcatcggttatggttccgtgaaccatccggtagaccgtgatccggtgtgtggatacacaggcgttatagatgatatctgtccgcgatgcggacgtaaagaaggagaaccggtcagcctggctttccttaaggaactcagaaagaaatatccgaatgtaccggtgtacacggatgaagaaattatggcaggaggaattgaacatgactggagaagaactcaggaatgcggatgcagcagcaaatagtgcagtagtaggtgaaggcgtgaaatttgaaagaatccgtcgaatcacaggttaccttgtaggtacaacagaccgattcaacgacgcaaaacgtgcagaagaacacgaccgcgtaaaacatggcctgaactaaggaacatataaactattagttaagtgatagtgctagacatatacttggctaaaatataacctacacaaaagaaaaatcggctgcccggtagcggccgatttttctggtatcagagattgtatagaaagacagataattttgagacataaaaaactgtagcgagaactatggaggtttcaaaattatcgtcaacatagaaacaggagaagaaaaatggacaactgggaagccgaaacactcaatatcagcggaattgtggatgattctattgtggatgggccgggcctgcggtatactatatttgtgcagggatgtccgcatggatgtccggaatgccacaatccgcagacacacagttttgaagagaacaagcgtgtaacccttggtcaactcatgtcagagatcaaggagaatccactgttgtacggggtaactttttcaggcggagagcctttctgccagccggggccgctggcgattcttggtcagcagataaagaaggcaggcatgcatctaatgtgttacagtggttatacgtatgagcagcttttgaaaagagcagagacagagccggatgtgaccgcattactcaatgtagtggatgttctggtggatggcccatttctgattgttgaacgtgatttggaacttttatacaggggcagcaggaatcagcgtctgatcgatctgaaagcgatgcgtgaaaaaggagacagatcgcatgtgattttgtggcaggaaatgtagcgcacggctaaaataaatcataagaaaatcagctgatcatacagaaaaataaataatatggtaactgttcagagccaagtaaaatttcaaaaaacaggtataaaatgcttgcatttttaagactgtttttggaattttatttggcggatacgccacaccgacgaaatgcgtagcattttggaggttagctctgaacagttacataatatggtaatttacgagggggcataggcatgcatcatatttataccggggatggtaaaggcaagacaacagcagcggtagggctggcggtacggtgtgcaggaagcggcagaagagtgctttttacacaatttcttaaaccggcgaaatccggtgaaatagaagccatggaagatatggagaatatgcagatctggctttgtccggcagagtttggtttcacctggcagatgacggatgaagagaaggaagaagcaaaagatatttatgaacgttatatatgggatattacccgaatggttttacaggggaatttctctatgcttgtgatggacgaagtgattggtgcatgcaatgcaggacttgtgaatgaggatgaattgagggagatgctggaacagtttccggatgatatggaggttgttctgacgggacgcaatccatcagaacagttgtgtgagtgggcggattatctgactgaaatgaagaaaatcaagcatccttttgatcagggagtcaaagcgcgcaaaggtattgaatattaatagcagaggtattcggtttgagtagaaggatggtagagagatgtttgagacattaaagggcagaataccgaagtccattgatgaagatgaatatcgtaagtttgcagtgatggtggctctgctaaaacaggaagacggactgcatgttgtctttgaaaaacgtgcaggcggtttgaagcggcagccgggagagatttgtctgccgggcggcgcaagagatggcaatgaatcatcggagacgaatgccatccgtgagacgatggaagaattgaaggtatcccgtgagcagattcatatgattgcgcagatggatacgctgtatacagcctatgacaataaggtttctgtctatctgtgcgaattgacagattatgagatgacttataataaagacgaggtggcagaaatttttaccgtgccgctgaaattcttcatggaaacggaaccggaggcttatacgaatacagtgcgcctgatgccgccggaagattttccttttgatcaggttccgggaggacggaactaccattggcgggatggacataagaaagtctatttttattattataaagattggattatctgggggctgacggcttatgtgctgcgaggcgttgttcgaacattgaaaacagaacttccggcgcctgattgtgagaatctggttgtataggaatggaataacaggtataatgaaaagagaaaggatgtgatattatggtagcaacagaatctgtaactatcaaagttccggtaggaatgtcgaaatatctggtaacagtgaatccggaaaccgagctgacaagaaatgctttattgttgtacccatatatattaaatcagaccatatctcatgggcgtgcagcagaaattcttggaatcaggaaatccgaattaattgatttatatgataagttgggttattcttactttgatatgacattggatgatttggatgaagaactgaatactttcagaatgcttaaaaagaaggagactgtggtatgattgttgtatcggatacaacaccattgatatcacttttgaaaatcagtcggttagatttacttgagaaattgtttggggaggttttaattccatcggctgtatttaatgaattgacgacagatgaacgatttcaattggaggctaatcaaatcagacaagaaaagtttattgtagtaaaagaagtcaataatctggagtctgtcagtatattaaaaagagcaacgggccttgaccagggagaaagtgaagcaattgttctgacagatgaattaaatgcagagttgttgttgatggatgaagcaaaaggaagaaatgtatcatctcaaatgggattacaaatcatgggaacgataggtattcttatggcggcttacgaagaacatgaattaacatccaatgaagtcaaagaatgtattgatggtttaaagagagcagggagacatattgggcagcggcattatcacatactacttagtagattaaatgattagttttgaacaataaaaaataatcgagagtttacagtgtaagtagactctcggttttatttacaaacatatgatgaaaagaggcatgatatgaaaaactttacaggaaaagtgacggatgttgacaataacggcaatccgattaagaagaaatccagtggaaagaacggcaagaaatccggttttaagaagccggcggcagcgaagaaatcatcaggcaaaaagccgttgaaggatattacggctgtgatgacgaagaagccggtgcgaaagattgtggaatattattatttttttaatgaagagatggacgccagaaaactgcagtcagcggtaggcgaaaaatggtttgaaaaggcagatatctggccggaactgaatctgatggaagtggagatgaattttgattctctgatttttcagaatgctgaggagtgttttatagatccggcagaccagcagtggtttgaggagcggggtattaagacaaagtatcagatcagttatgataccggtgatattgaggcggttcgtgaagtacttcacaacattatggctgccctcggcggaagaatctgcagcgatacagacgattttgaaccgagttgcacggcggatacactggacaaactcatatgaattcacagcagatagcgtattttcttgaggttgtcagacagggaagctttacaaaggctgcccaggtgctgtatacgtcacagccgtctttaagccgtcagatcgcgcggctggaagatgagtttggggcggaacttttttgtcgttcaagaacaggagctgttttatcaccgatcgggaagaaatattatgatttatttgtcgagatggagaaacgtctggcggagctttccatggaggcgaagagagagtctctgcagcttgaaaagagcgttcatattggagtgccggaagggtgggatgttctcccattgatcgagaaaatggaagcgttgttgtcagtgcgcggtgaagaattgaaaatgactttttcggcttatagttaccgtttgctgctgtcccagcttcgcaatcatcagattgacggatgtatctgcccgaagggcctgattgtgccgctggaacatatggcctttcttgatctgccgccccttcagaatgtgctgctgtattccagaaagcattgcccgccggaaaacggacagaaatatacggtgaaagatttcagaaaggagaaactgctgcttcttgagcaggaggatacttctattccgaaggcgtatcagctgggctttctgcaggataaaggcattatccctgagacaaaagaatatcacaatattgattcaatcctgttggatgtgagtctggataaaggctttgccatctcagatatctggtcaaggggcgcatttgacaggaatctgtcctgtttgaaattggatcagaaaatgcccatctgtgtggcatggccggagaatcattcctttgatgagatgcgattgtttgccaatttgtttaaagagagcatggagtctctgcagtaatgcagggacttttttggcctgcgaagcagacttgaatgctgtttcgaatttataggcaaatctggcatacgtatttaattgtggaaattttagcatgcatttttcgttatatacgacatgaatgaatgggtattttacagtggcctgaccggatggtaaacttcctattagaaaaacaagtttatgaaaaacggaggatttttaatatgggtttagtagaaggtaaagtcattattgtaacaggtgccagctcaggtattggtgagaaaacagcagaagtattagcagcagaaggtgcgaaggttgttcttgctgcccgcagaaaagaaaagctggaagatgtggcaaatcgtattatcgcagcaggcggtgaagcttatacagtcagtggtgatgtcagtgtcagagaagattgcgacagaattgcagaggaaacagtaaagaaatacggtcgcatcgatgtgcttgtcaacaatgcaggtatcggcgataaacagatggcgatcacacgatgcagcgatgaatggtggagacagattattgctgtcaatcaggattctgttttctatatgtcaagagcagcccttgtttacatggaaaaacagggagaaggttctatcgtcaatatttcttccatcggcggtgtatttgcaaacgcaggtattgcttacagtgcagcgaaggcagcagttgtggctatgacaaagaatgttgctatccagtttgcaggcaaaggtatcagatgtaatgctgtatgtccgggccctacaatcacaccactgctttcatcagatgaaattgcaacatttgatcaggaattcatgaagacatgcaatgagcatatctgtagaagtgtaccaaaggcagaggcagtggaccaggccaatgcgatcctttattttgcaagtgatctgtcaaaagctgtgacaggtcaggccctggtagtcgattacggctgtaatctgtaaaaaaagtaaaaacgcggcatatatgaaacatcggtcgagtctgttttatatatgccgcgtttttcttgtttttatgagtgtaatactactaacgtcagttgccaggaattaagtcctataatcgggaaattacttttacattttacaaattttttcataagaataacaaatctcaattcataaaagacttgctatgcagtttttagtgttcccagcgtcctgaagcaccgcatggcagtaccagtccattgccggataccggaagcccaacttcatcggcgatgacatggccgccgtgattggccttgacagcggttgagagcatgtaagtcagaacggccggctgaagtccggttgtgtaggagttcacaaggaagaacagcggattgtcgctgagcagtttctcgcataactggatgaatgggtaaatggatgtctcaatcttccagatttcgcccttagggccgcggccgtaggatggtgggtccatgatgatggcatcatagtgattgccgcgtcggatctcacgttctacaaacttctggcagtcatcaacaatccagcggacacttgtctcaggcagtccggagagtttggcattttccttggcccagcccaccatgcctttggaagcgtctacatgggttacatgggcgtcggctttggcagccgcacatgtagcaccgcctgtgtaggcaaaaaggttcagaatcttcacagggcggttggccttcttaatgatagaagagaaccagtcccagttggcagcctgctctgggaacagaccggtgtgtttgaagctgaatggctttaaattaaaagaaaggccgagatggtggtactgaatcgtccattgctccggcaggtcaaaaaactcccattcgccgccacctttattactgcggtggtaatgaccgttcatcttcttccagtgtttatccgtttttggtgtattccagatgacctgcgggtccgggcgtacaagaatgtactgtccccagcgttcaagcttttcaccgccgcaggtatcgatgacttcataatctttccaattatcagcagtccacataatatcctccataatatataaaatcaataggtccgtggttacagacgctatatccaataaaagcagggtgctatacgtgtgtatgcgcaatccttgcttattatagtataaataatgcagcgtatttttacaatatataaatacaattgaattgaatatcaatcaggtgaagtttttgataggggtgcaaggatgcggacgataggtgcttttgggaggcagttggatgcggatagatagtgttatatatagaagaaacagaaaaagcgtgtgattcggaatgcatttggaggttagttctgaacagttacgtgtatttgaacaaatacataaaaagggtgagttgcaaaagtaacttctactttgcagaagtaaattctactttgcaggggtaaattccatacaaaatagaaaaattcatacacacccactgtcacttccgttaacggcaggtcagatgttaccgttccacggatgctgaaggaacttcccgccttcattgtcgctggtttggtctgtccgctgatcttcggtgccgccgtacttgttgtcgtgctctccagcttccatcgctgtccttcagtcagattataattccagatccggatattcgttccgttggcgttcggaatttacgcctatggagagtacaagaacttgtgagtagatagatatttatatcatcaaaagcatactcgttgaagtaggaatgaaacatggaagtttataactttttataagttttcagtaacggtataagaaattgaaaaagaatacaacaatcgcctttaccggcgatatcggctttgataaatatatggagaagaaatgggaggacgaagcccttctggctccggagattacagaatttctgaccagtgcagatcatgttgtggctaacgtggaaggccccttagtggacaatacggcgacactgacacaggcagctgagatgcgtctgatgcatacgatccatcctgatgcagaaaaggttttgagagatattcacgcagatatctggaatctctgcaacaatcacattatggatgccggacaggacgggttggccctgacacttcaggaagcaaagaaatttggggcaaagaccattggtgtcggcatgaatatgacagaagcggccagaccattgatactggatgaggccggaggtatcggcctttttgccgtgggctatcagcgcggctgtaaacctgccggagaagacaagggcggctgccttagttggagcgagatggaaatcattcgcagcaccattcaggagatcaagacaaaatgccgctggtgtgtggttgtagcccatggcggtgaggaatttacagcgattccgtctccgtatacaagagagcgttatcatgcgtatctggagatgggggcagatctggttgtctgccatcatccgcatgtgccgatgaactatgagaccgtcggagataagatgattttttattctttaggtaattttatctttgatacagattatcagcgggcgcagtttaatacggaaaagggcattttgctgaaactgcattttacagaggacagatattcttttgaggcctttggcttgaagatcaaccgggaaaatgaacatatagagtctgctccacttccgaagatttttgttgatattcaggaggatgattataataagcttgaaccattggcagcgaaaatgttcttagctgcaacaaagcgtcagcagctgttcttatatccggataaattcaagaatgctacagaagcacagtggaaagcacatttctatgaagaaaagcgcagcggccgtgtgccgggtgaggctctggatttccagattatctatccgattgcccaggaagaggccaaaggtgcatggaaagagtgtaagttggaagctgtcaaagcatatattttggaacagatgtaaaacaggatacaaaaattatatccggttctgaataattgcggggacattatggaaacaattaaaaaataactgttgccattttcaaaataaatgatataatggaacaggtaggctaacatggctcagtcggtagagcgacgcactcgtaatgcgtaggtcgcgggttcgattcccgctgttagcttcaagccggaaactctggagaagtgagggtttccggctttttttgcgttttgaaaaatgtgtaaaaaaaggggctttttttgaggtttgtctactatttgtctactacgcgtgaaaaagttaaggttatttattgtagctggaatacaaactgcatggagagaatcttacaaagtaagataaaaataccttttgatagtcatatgaggtagtgaccatcagaaggtatttttgtctgcatatgtttttagaagagaaatataattttataataagggttgtattttttttaacttcaaaatataataataatgtgattaatgtacaccaaaatattaataataatgtgattgtaatacactaaaataataataattatgtgagaggtgagcgcatggaacggtttattttaaaagaattactggagtggaagaactctccctatcgtaaacctttgattctgaaaggtgtaagacaggtgggaaagacatggattctgaaggagtttggaagatgctattatgagaatacggcatattttaactttgatgaaaatgaagaatataaacagttctttgagacgactaaggatgttagccgtatcttacagaatttgatgctggcaagtggtcagaagatcgtgccagaaaagacacttattatctttgatgaggtgcaggactgtccgaaggttattaattctatgaaatatttctgtgagaatgctccgcagtatcacattgcctgtgcaggttcacttttaggcattgctttggcaaagccttcatcttttcctgttggcaaagttaactttatgcaaattaatcctatgactttttcggagtttttaattgctaatggtgacgaaaaccttgctgtatatctggaaagtgtagatgccattgagccgattcctgatgcattctttaatcctttgtatgagaaattaaagatgtattacattacaggcggtatgccagaatctgttctgatgtggacggaagcacgagatgtatctgctatgcaggaagctttgtcaaatatcattagtgcctatgagcgtgatttcgcaaagcacccggatatcaaggaatttccaaaaatctctatgatttggaagtctattccttcgcagttggcacgagagaataagaaatttctttacaaagttgtcaaagaaggggcaagggctcgtgaatatgaggatgcattacagtggttggttgatgctcggcttgttcataaaatttaccgtagttctgctcctggtcttcctgtggcagcttacgatgatctgtcagcctttaagatttatcttgtagatgttggtctgtttcggcgtctggcaaagttagcgcctacagcttttggtgacggaaatcgtttgttcacggagttcaaaggggcattaacggagaattttgtacttcaaactttaattacacaatttgaagtaacgccgcgttattggtcacagagtaatcctccttatgaagtggatttcctgattcagcgagaaaatgatatttttcctgttgaggttaaatctgaagctaatatatccagcaagagtctgaagaaatttaaggagattttcccggataaagtaaagcttcgtgtgcgtttttctctggataatctaaaattggatgatgatatgctgaatattccgctgttcatggcagatcaggcagatcgattaattggacttgctttagagcagaaagttgccaattaaaactctgaaaatgtcacatatataagcaaaaagataaagcagccggaatgtattggaccattcagttcaacgcattccggctgttattgttttatttatgcagaaagtctaaaagaagtctgtttattcccgatataaaacacacttccgtccggcacttcgatgctggtattggcaatgagccgttctccatccgtgttgtaagtgccgttggcagagtaatctgtgatgacaaaagtatgttgggcggcatggtagcaaagacagatgtgttttctgctgatatcagcagtgttcaccacgatctgacacagctgactgcttcttccgagaaaaacattggtgtaagccgggaggggaaaactctggtttgtcaaagggccggacagaaagaaaagtgtgccgcagtcggcgggtgtgttttcattgtgaggcaaaagatcttcgacaaacttatcagttgtatcagcagtacgtgatgtttgtatttttaaaagtaaaaacagactgatggccgggcatatcagaagcagcagcggagcggctatatgctgtaattgatttccgtgctgccagaatcctttgagcagcagaaaagctgtggacccgccaaaaacaggcaggcacaggacagccagttctataagcagcagtaccagtgcggctgctttgtagcctcgggaataggtatctttcatggatgctatacctccatttctgcaatatgctgtgccaacaactgcaaggtgtcagctttggaatagaccagattgcttccggcaagtgactgcataaaaccataaaaaatacggcagatggatgcttcggcgatatgaatattacagcaataggcaccatatacaaaagcattggttgtgtaaatatgcagtcctgttttcggatgaacatagatggagaggtaatccggcagctgaaggctggtaggacgtacaagcataccttgaacggaacctctgtcaatttcatcataaagatatcggagcatctggcgaatatcctgattttccaatggcggaacatactgcggcggcaaatccatcatggtacgggttgtaatgagatcctgcaggcctttttcggtaaaaacagtctggtaggtgccgttgatttgctgaaggacggaaaaatgatgttccacaaggttatacatttctttatacggcatggaaccattatgcatgtatttgcggatgactttcggtgtaatatagcggcctgtgcatggctgcggcatcatgatctgcagagaatccggcgatgtgttgctgatatattcctgaagtacttccagtatattggaattacagcgtaccaacggatcgcagcattccagcagattacggaaaaatccctgatagaattcaattaattctgtatcgtcgcggatttgtgccatggatagatcttcagaaagctgaatcaggtaatgcggcgtaatgatgtaatagctcataggcgacaaggcggcggcttttggcgtttcgcagaaataatacggccgatagctgccccgggatgccagacacagaggaataacagaacgcagcagctgaatattctttgacccggaggtatggttggaataaaaacagagcagtgcgtctacggaatagtcacattgagcaagccataactccatcaattccatggtcagatccagtttctcaggcacatacatagaaaagttcgctttatcagtatgtgtcgcttcataaattaaaacattccgaatcgcattccggacggcatattcgcccttaattaatcggtttgccaattcgatgctgtctacctgcggcgggggcagcattgaaaaacgaattgaggaaagggcattcaacagactgcagacggcctggcggttttcataagattcctcgccctgcagcagaatatcatacagtctgaaaaattctttcttcttatccacaggcagattaaaatgacgggccagtgcctgtacaactttataagataaaatgcgctcatctgtcagcgctttatgtatagaggtgcgttcggcttcaatacttcgagcgataaatgagatagattcaccactgtcctctatgagattttttagataaatactgaattttgacataaaattgtgtctccttttttcctgaaaggcatattctatagaatcattttagcatattctgtggaagcaatctgtgacaaaaagcagaaaataatcagcacatattttgtcacagattgttccggaacataattttttttatacttgtagcaggaagagagaccggaggtggtgatgtgaaattgtttggcagaaaaaggccgcagcgatcagcagatacatctgaaaaaagcccggaaacagtgaatgttcaaagtcgggatgtatctgttgcagaatccgatactgaaatgatgacagaaaatgtatatctcggacaggaacaatatcagccgaaggaactgcaggtttcggcggccagtctgatcggaagcaggagaaatcagcaggatagtctgtgttataccagcctgccggataaagggtttctggcggttgtctgtgacggcatgggaggccttggaggcggtgaactggccagttatacagcttgtgcagggatggttgatgcgtttcaaaaatgcggtgatgcacagccggcagatttttttgtgcgtacagcttcggaaatagatgtatctgtggccggtattgcagatgcggaaggggtaccgataggtgccggaacaacccttgcggcagtctggataaaagagaatggtatgcattggatttcggtgggggacagcaaaatttatctggtgcgcggtcatcagaccaggtgcctgacgacaccgcataattataaaatgctgctggataaaagaaagcaggctggaaccattacatcggagcaatatcaagcagaactctcccggggagaagccctggtcagctatattggcatgaatggtctgaaatatatggacgtatctatggaaggattggaactggaggcagaggatcagatagttctttgcagcgatggtttttacaggcagtgcccggaggagaatctggcacaatgtctggaaaatctttcaggggattatgaaacctatgcttcccagctggcggaggcggttattcggaatcagccccgtgggatggataatacaacattgattctggtcagatacagtccggaagaaaatgaaaagaaaataagagaagtaaatgaagaaaacgaaaaaggagatataaagacatgaaattaagtacatgcccgaagggccatttttatgatgcggataaatatgcttcatgcccgtattgtgtaccgcaggatgaggcggaagctgttacagaagcactgaatgtgacgatggaagatttttcaacaagagcgccatcaacaggagcatcagcagacggagcagtacagcagccggtatctgttcagacatccggtgcagcgcagcaggcagcatcggggcagacgtcagcggcagttccgacttctgaaaagagaagaacagcttttgtcaacacggcggtgagtggttgggaagaaccggaagaggatgaaaactgcaccgtcggttattatgcccaggtcataggtattgaacctgtggtgggctggatggtctgcatcaagggcgcttacagaggcgagagttttaagctgaaaagcggacgcaattttatcggccgtgcagccaatatggatattgtattgggcgcagaccagagcgtgtcgcggcttcgccatgcagcagttgtttatgacccgaaaagccgtgctttcattgtagcggcaggggatgcaagagaattatgttatctgaacggggaagtggttgtgaccagtcagaagttaaaggcgtacgatgtgctgacccttggcaatacagagctgatgctgattcctctttgcggagagaagttttcatgggatgatgcatcagagaagaatggggtgaacagataatggcaaaagaaaaacaaccactgacagctgtgcagcggggaaaaagaggagccctcatcggaatgattcttgtggaaatcattatggttctgatgatttttgttgaaagcagcaacatcatagaagtgattggaggcatattgattgcgggatttggcggtgctctttatggctttggctatgcttttggtatgcgctggctgctgggctgggcggccggtgcactgcattatagcggacatgtactggatgcaggctttctctggtggatttgcaccggaagaaaagaaggtattatccgagggttaatattctcgatgtttttgatttctgccgccgtttgctttgcctggataccgggggtggtaaaggggatcaaagacgtccgtgcagagaagaaaaacagtgccgcagagacaaccggctatgcggttgagggcaaaaaggccggaaaaccatggagacttaagaaagcagaaaagcagcaggatgagacagcactgccgacacagaatgcagcggtaaaatcagtatctgcacagtcgcagactgtttcggcacagcctcagccaatggtggctataaatcaggcagcggcaggtatagcgcgttatgtggactgttatggcggagaatttaacggtgcgtcctttgatatgaaagacattctgcagctggctatcggcagaaatccgcagctgtgccgggtgattctgaatcaaagcggtatcagcagagtgcattgcctgatacaataccgaagggacggcatgtacgtgcaggacttatccacaaacggtacatatttattaaatggcgcacgattgccgaaaggcacttttgtgcctgtgaaaatcggtgatggggtgcgactgggacagcaggggccggaattccgattccgttagagaatttcattgaaaaataaaaaagaaaagtgaataagagacaagagaagaatatctcatgcagatgggctgtgaaggccgtatttgcatgggatattcttatgtcaggtatgcaggactttaaacggtactgtctgaatcatttacaaacaattgcagctgttgatagaagtcttcatcttcagcagattcatcggaagaagattcataggtaataaaccgggtgacactttcaggtgtagatttaaaaaatctgtataatgattggtgcagtgtttccagataatggtctgaagaatctgcaaaagaggaatagtaaacagcattggtatacagcattttgacagcctttgctgcggcatatatagcagattcatcattcagattgttttcaccggattcttgtgcgttgttatagatagtttcgtaagtagttgccaacagaccggatattgtagcgcaggaaaattcataatctatatatgcagtgtcacttgaaacaccgataatactcatcaagcgactgatagcgagcatttcgtcagctaatgctgctttactggtgctgtcgtaatctgtcataagaaaagtagacagaagaaaatcagagttacttatctgttcggcagtatgatcgcaccaggaggttagtaagttactgtaagaagacaacagttcattatatgccgagggattggaaagcattgttttccaaatgtcataggtttcatttagattgtctaatagtttttcatggtctttcgaagcgactgcatcttctatattttcctggatcgctgtgattctgattgattcagcggttgtatcagaagttatatttgcagaggaaacggactcagaaatatctgtgtcagatgtttctgattgccatgaaatattattttcatctatgtagagtttcatctgctgcaggaaatcgtctttggcattatcttccgaagaaaaatctatccagacagaatattcagccaccgcatcctgatgcccatcaaaaaagcgttgtatcgcattgtggagggtcgtttttgaatcatccatagcgtagatggattctacatcctcaaattgctccgatataagcggcatggagtaaagcagatgaacaggaataaatccggcaaatgtggtgtaatcggcatacccgttttctgatgcataagctgcaccactggaataggctgtatcaaagagtgtactaatggcagtacatgcctcatcagaatcaatgtaggacaaatcagccgaaataacagtatgggcaatcagtatgcctatatcggcggcttcctgctgggattgattcgcggatacattagattcagtattataagaggaagtaaggtcaaaatcgaaattgtcccagttctcacttaattttgtacaccatttaggaagctgtttgatataggctttggtgtaaatcttatcgctgtattcgtccggatggttgataaccttgtcccacatatcgttgacttcacggatgctggataacagcgtttcacggtcgttcagctttaaagcatcatccattgcatagctttcaggcgtaccgatagaactgctgaatggccggataaaccatggataccggtatcctcgtataggataaaaaagcgggccgccgaaaacaaggtcaaaacataaagcggcgatgaggccgatggcgatataacgacgtttccgggattttttctttggaggctctttttcgctcacagtggaatcaggaacaggcgcggatacctggtcatatgtatgagtatgtgtattgatggacgatggtgcgttggctgactcagattgttttgacagttcagcatttttctctgaagcatccatttcctgtgtttctttgggagagttatctgttatttctcgagccgcttcctttttcgtcggataaagcactttcatcagtgctccgatatccggatatctctccatcgggtccatctgcaggcctttttccaggacagcacaagtggaagggctgagggacagtccttcaatacggctgatcggtgtcagatggtcttcttcggcacgggccgaggcctcctgtggcaggatccctgtcagcatctgatacatgacagcacatacggcatataagtcagtccatggcccctggcggctgttggaatgatattgttcttccggggcatagccgcgtttcagaataactgtcagattgtcatcatcgctgcgggaaaaagtccgggctgcgccgaagtcaatcagcgtcagggtgttatctggtgataacatcaggttttcgggactgatatcacgatgcagaatgcctttttgatgcatggtctgcagggcaagaagaatcggctgcatcagagtcagtgtttcctgctctgaaaaaagcttttgctgctgtttcatgtatttcttcaatgaaatgccgggcacatattccatgaccagataagttgtgttgttggcctgaatttgttccgcaacatgaacaacatgttctatatcggagagcagatacaggatgcgtccttcctcagaaaaacttttcatgccagtgcggtaatagacggcttttgtatcatcagcaggcaccacagtttcattatcggtgtcacgaacagccaggttggttggaaaaaattctttaatcgccacgattttttaatcgggcagatgcatggcaatataagtgatgccgaaaccgccttttccaagaggagcgcccagcagatatttgcccgcaaggatggaaaatacagggagactgtctttgacagtcaggtgtttttcaggataaccgcagtgcgggcaggttgtatttgaatccttcaggtgctgcatgcatccgggacagagtttatcaatatcgaccatagaaaatacctccgtgtctggtatatggttttgtctatttcagcgtgattgtcagcgctaactttcaaaatgaaatgcattgagacttttatgcagttctattttaacacagcattgaggtcggtcttgtgacaaaagaacgcaaaaatcgggcacatattttgtcacagattgcccggcattcataaattttttatactggaagtaagaccgcaaaggacgcatccgggggatggcagaaaaagttttttgaagataatgaggcagagaaatggtggacttttgcggatgataaagcagtgtaaagtgagggagaaattatggaaaataatatgcatcggccgagatatagtctgccgccgcaggccattgtcgggggacggtatctggtacgggagtttctggaggaacaggagaatcagatcatttatctggccactgatctggtggagaaaaagcaggttcgattagcggaatgttatccaaaggcactggtacagcgtaaaggtgaagcaggggaagaggatatgatcattcgcccccggagagagccgaaggtggaagaaattcagcgtcagtttgaaaagaaatataagcaagtcattagagatcatcataccgtgtatgcggtgttgccgttgaataagaaaaagccgatgggggctattgcgctttgtatggctgtgattgttctgggagcagggatgctggctgcaatttttttttcgggaaaaagcaaggaaccggtcgagaatagtcaagatattgttataacatacgaggataatgattatataatgcggccgtctgcggacagaatctgtcaggaagagacttccggagcaaaatattatgaccgcatggtgacggcatttttgcgcagagaaccatcggaagatgaattgcaggcgttggttgactccgtgaatggaacgcttacaggacaaatcagaggtgcggtggattatgtgcagattgaattgccggaatccggttttgacaagattcagcaggcagcagaaatgctgatggagaatgaactggttcggtatgcagattgcgattatccgatcgatatatgtgaaaatgtggatgaaacggatacaaatccatggagcaaaaagcaaaattcaaagggctgcaaatatgatgaaggcaaacccggcggcaataactggtgggcagagtgcatcggtgcgtatacggcatgggggctgaaaagttcggtgacagaccatgtaatagtggggattattgacgatggttttaacttcaggcatgaagatcttcaagggaagacaagtacgatattaaagacaagctcgggagaggacagagatgttgtcaattggaatcatgtattgtctgtgaagaatgagtggtattcaacatttggggatcatggaacccatgtcaccggaattatcggggccgttaataacaatataggtattcgtggtgttgcagatgatgcacagctgctggtggcctcctggcgtctggaaaatgggacaaataatgctttatcttcaggtgaatatgtggccatggaagaagagatgattgcaagaggagcgaaggttgttaacaattcatggggacagactgtgatgagtgatacagatttgaacgaacttcggtcatgtgatgaatatacggctaaaacaacagcgaatatgatcatcggaatgcttgaaaagggatatacacaatttctatttgtgcagagtgcgggaaatggattaaatagggaaggaaagataggacttgacagctgttataatagctgttttgccagtgtttgtttattagaaaatagtgatttctggactgagcatggtgagggctatacctatgaagacatacgggatcatattatgattgtcggcggtatgaaacgggacagaaaaggccgccatgtggatacgggctttaattatggaaatgatgtggacatttatgcaccgggcagagagatatacagtacattgggtgaagcaaataagaataaatacggcaaaatgagcggaacatcaatggcaacaccgatggtcacagcttcggccgccttgctgtggcaggaagagccaatgcttaccgtggatcaggtgaaggattatctgctgcagaatgggcgaacgctggatattacctatgacaaatcaggcggaaacgcggaacttcgaccggaacatttgtcgcaaacgcctgtggggctctctataggagatgcaatgagagcaatgaaaataaaagaggcagaagaaaggacagcggttgctttgccggagtatctcaaaaacaccttaattccgcagtatggcattatgtcaacggattcctggaagctggacaattcactgccgacctggtcaaagggggatgattctcctgcggatggcattttaagtgcgctgatagaggattttgacagagacggtgaggatgaactgcttgtggtacgttttgagaaagaagataataagaaattgtatctggaagtattcgagaattatgacggagccgttgagctggccacaggcgccaagtttgatattgactggctgtgccgaacctgtcagaacaacagactttctgtttttgcagagaagaaggatggtatgtgtcggatttatctttatgcttttcagaggggcaatggcggcggagatgagtcgcttgtacagttggagtatgagcaggtgatgatgcctcaaattacccttgaaaattactggagcttcaggatgggcagtgatggaaccgcttctgtgcagtcaggaactttgaagttcaatgaaataaatcaagtggtcgggttgtgggattatggtcagggcacggatcaggcagaggccgattatgaggagacagccggggcaccgtatgaatcggatagttatccggaagctttcatagggatgctggaagatttttatgggaatctcgaggaaaccaccggactggtacataagacggaattgccgcagtattttggggatgattccattggaatctatgtatctgctgatgatgtgtatagcggggaaatgctctatacagccaagaatctttttgaggaggacagcaatacgatatggattgcctcactggacaaccatatgtatcatgatttgagcagcaataccatagaaaatacaatgataccgcaggattataccggaattgttagatagctataataatatgttgaaagaaatcaggcaatgcatagacgttttcaaggggaagaaatgtatgacgagatcgtaaaggcagaatgaaagtggcagagaaaattcatgcatggtatgtatcggatgttttgtaaaattggcgggttttatttacaaacgattgcggcaaaggtataatatacaggaaatccgattgttttatagaaatagctgtcgacggatgtcaggacagctatttctatgtgtacaaaagagaggaaaagcgttatgaatatcaaaaaattgacattaactgccttttttgcggccatcgctgttgcaggaagtttattttcatttccggttctggggtcgagatgttcaccgattcagcatctggtgaatgtcatgtgtgctattttattaggtccatggtatggactggcggcagcctttctggcagcattgattcgtaatattctgggacttggaacacttctggccttcccgggaagcatgtgcggagccctattatccggtctgctgtacaagtggatgaaaaagctgccggcagcttatatcggcgaagtggtcggtacaggtattattggcggcatgctgtcttatccgattgccgcagtgctgatgggcaatcagacggcagctttattcacctttgttgtaccatttctgatcagtactgttggcggcacgatcatggccatcgtgatcacaatgacaatgaagaaaacaaaggtgttggccaggattcagcagcagatcaacagctaaccggaaatattgccggtcacagttaccgttgctgtgccaggggtcagcgtataggcgccggttgtctggctttgtacatatgtggcggccggtatattgatgacacctgcgttggtggagaaaacaccggttacctgatcgtagctgtagtttgatgtcggcagaactgttccattgtaggtgacggagatatccgaaagaatcggtgtaaatgtgtctctaatctgaaccagatcatcatcggtggtggcggtattgccataattctgaatactgaaagtataagtgatgcggccgttttcggcaatctgagcaggacagatacctttgacaatggacagattaggtacagtggctgttgaaattgtgtgtgtggctgtcagcggtgcagccagttgagcgccggtgacacggacagtgtttatcacgttgcccgttgcagcaaggggtgcataatcattgatatcagcctggtagataaatgcagcattgccgccggacggaatagagacaccggttattgtgatgccatctgcggcggtgacggttggtgcaggctgtaaagtgccgttaataagcagctgcatggaattcggaatgtaagtgagtgggtacagggtgatagtttccggtgtatccgttgtaaagctgtaagcaccgagattgtcagtgacggtcaagtcgctaaaggctgttgtgccggaattgacaatactgaagatataagtgatacggtcgccggaggcataagtgtcagaaagtgctgtttttgatgcggctaacacttcaagaatctgaccgtaagcgatattggaattggctgtgatgccattataggaaagctgtgcttgattggaaaaagtaggcataaataagactcctttcaaatgagtgtactgggaaatcatgttccctgatatatcatatgaaaaggagtctttattgttcttgtcaaatcattattcatatacagcagaaaggctgatacagagatttatttgagtgcatcgcccacaatggcgtcctttctgctgaggatatcatcactgagcagctcttccgtcactttctcaaaaccgatgcgatggatggtatcggagagacgttcacccttctgtccctgttccgcgaagaagaggattgtcttctcgagagtagcaagaacttcttcctctgtggtaaaaatcttagggatccgtttgcccatagccactttcttgccccaacggccgccgatgacgatggagtaaccggcgatataatcttcgttcacatggaatggacatttgtggaggcagcgtccgcagcgattgcacttgtcagggtcaataaataccttgccgtcaacaacctttggcagactgatcggacaggcagcttcaatctgacatttcttacagcctttgcagagatctgtgtttggctgaggaacacgctgaccgtagataccaaagtcgttcagggacggtttgacacagttgttcggacatccgcccacagcaatcttgaacttgtgcggaagtgttaatccgcggtagcctttgtagaaaaggtgatggattttctcagataaagcatatgtatcaatcagtccgtactgacaggtggtacctttacaggagacgacaggacggattttggcacctgtaccgccggtttcaagtccttctttggcaagataagcgataaaatcaggaatcttgtcgtattcgacgccgatgacttcctgtgagagacgggttgtcatggtgatctggccgctgccgtaaagggctgcagcatcggcaatacatctcgcttgggcagttgtgatccgtccgttgccggtaacgacacgggcgttgaatctgttcgtccctttattattcaaaaagccaaggcctttcagacgtttaatctcatccgcactgacaggtgtctcagacggtgcatcggaagcaggttcactctgatgggatgcaataaatgcctccagaacatcagctgccttttctactgtgatcaggcagcgacggtcatcaccctccggataacgatagcgcgccttcaattcctcacagttgtcactgccgagggaagccttgaaagtgtcaacatattctgcacagagttccttgaagccttctgtttcatgggccttgtcaccgcagaaaagcaggctgagcacagacatggcagctgaaagcgcaccgcacgtattgccgcagcccataccggcgccgaatccggaagccagctttaatgcgcgttcatcaagaccgagatcataggccttgttggcagcgcgcaggatgcattccccgcagttataattctgattcatataaaaatcatttgcaatttcacgtaacatataatacctcctcgagtgttcgcataatttaattatactatagacatttcataatgtctttaattgttttgcaattaacaagacttcgtgctactattaaatttataaggggtaatgaagaatgccagttatggtatgattaaatgtaactgttcagagccaagcaaaatttcaaaaaacaggtataaaatgcttgcatttttaagactgtttttgaaattttatttggcggatacgccacaccgacgaaatgcgtagcattttggaggttagctctgaacagttatgattaaataatataaaaggatccggaggaaatatgcgatgagaagagctgacagagaagtaacagatgtggatgggatgatcgatattatcgaccactgcaaagtgtgtcatattgcgttgatggacggcgagtggccgtatattgtggctatgaattttgcgtacagatatgaaaatgatcagttagtgatttatcttcacagtgccaaagaaggaaagaaactggatttgcttcggaaggacgatcatgtttgctttgaaatggattatgatcatgaaatgatcccggcaaagtatgcctgtgcttacaatttccggtatgcaagtgttgtgggccggggacattgtgagattattacggatgtggatgagaagattaaagccctggaactgctgatgaagcaccagacaggggaagattttgtgatggaagcgaagcatacactggcggttgaaattctgaagatcactgttgaagaatttaccggcaagagacgttttaagaaatagatatagatgataaaggacggatataagatggcgacaacaattcataaaatgtcctgcccgtatgactgcccttccacctgtggacttgaggcagagattgaagacggcagattgatcaaagtgaagaatgataagacacatccggtgtcaaagaacggcatttgccgcaagatgcagcactatgagcaggatatttattcaacagacaggctgaggacacctctgcgtcgtgtgggcagaaagggtgaagcaaagtttgagcccattagctgggacgaggcagtaagggagattacagatcagtttaaagcaatcatagagaaatggggggccgaggcgattttaccctgtgtctattccggcgtcatgagcgatattcagcgtaactgcggagatgctttttttaaccgcatgggtgcgtcggaacttgttaaaacactgtgttcatcggcaaaaggtgccggctatgatgcggttgtgggcaaaaccggatgtcttgagccgacagagttaaacgacagtgatctgtatctgatctggagctgtaatatggcagccacaagacttcagactctggcggatctgcagaaaccggccaacagacataagaagaaaatattgatcgatgtgtatccgaacccgacggcagcgtactgtgaccaggtgatcaccatcaaggcgggaacagacggggcactggctttatccatgatgcatgtgcttaagaatgaacatttggtggataaatcttttgtggagaagtataccagtggatatccggcatttgcagagacactggatgtctataccccggaatgggctgagagtgaaaccggtattccggcagaagtgatccggcagctggccagagaatttggtcaggccaaggcaccggccattatactgggcagcggcaattcccgccacggcaatggcggtatgacggtgcgtctgattacgattttatccgcactgaccggggcatggcagcatcctggcggcggattatgtggctgtacgccgattgatacggattatgtgaataaatcgctgatcacccgtccggatttccgaaagaagccggcaagaaagatcaatatcaatcagatcgggcaggcccttgccatggaaggcaaagaggcagttcggggattttatgtgtatggatgcaatccggccaatacagtcagtgatcagcagctgattatccggggacttgaacgggaagatttatttaccgttgtgcatgaacgctttatgacagatactgcccggtatgcggatattgtactgccggccacattttctgtggaacagacggatatttatcgggcttatgggtattgtaccctgagtacaggccgtaaactggtggatgcaccgggagaatgcaggagcaactgggatacattctgccttctggcaaaaggcatggggtatgcggatgattattttgaccggtcagagaatgagatgctggatattttgctgagtcatccgaccagggcgattgcagagacttccgatgaggcgaaggaaacgctccgacagggcggttctattgcgttgccattttcagatcatctggcctttggcactgaaaccggcaaaatgctgatcgtcaatgagaaactggcagaaccgatgccgcattatacggcaggttacagcggaaaatgtcaggactatccgctgcatctggtggccgccccaagtgtgtggagtcttaactctacattccttgacagagagcatctgatggcatcccgcaaggaaatgacgttgtggctgaatccggaggatgctggtacacggcagatcacagacggtatgccggtgatggcctttaatgagctgggtgaagtgcagtttacagcccgggtagatgaccgggtggccgcgggcaatgcggtatctgaagggatttttgccggccatcagacgcagaacggcagcgggtttaatacattgacccatggccgactgtcagatatcggtgcggcaacaaccatgaatgataatcgcgtagatgtacgtccgttacagcgcgtttaaagaaattaagcttcaaaagagaaaacagtctgatcagacagaaagaaaaagaaaagctccgaagacaggtgttggatgactgcgcacctgagtttcggagctttttttacagcacggcaggatttggaatgatcaggatgagattagattatccctgtgtcagaatattctttacatgctggatttcctgagtgctggccttttcagccggcacataatactgatgggctcttgccagctgatagatttcctcctgggaagtctcgcaggcatttctaagctgttttaatgtctgtttcagctgtttgttttctgtttgcggaatcatttcaccaaatcgtgttaattcgccattgatgccggccagtgtgtcggcaaccattgttttttcatcgatcattttcaaaaacctcctttaatggaaaaactgcatgagctgctgtttgttctgcatggccgactgggcagatttctggaaaaactgtttgatctgaggatcggaagcgccggaagcatattccatcattttcttgtgagaggtttcgtagccgccgatgagatggcggagattctgcaaatccaatactgataattcgtccatagtgtgacctcctgtgaaaaaattacatgtaatgaaaatatcacacgaaacattacagattgaatgtttcaaaggcattatttgccatgctgtgaaggaatcattacaatgtttacgtatctattgtgcgcagtggccgtttcattatgtacggaaaaattttcaaattcagatcagtcccatgctttttaaaaggaagatccagaaagtcagtgtgacggaggacaacagagttgccatgacaatgatactggaggacaagacaccgtcattgcccatgtttttggccatgatgtaacaggtaaccgttgtcggagaaccaaccataatgaggatggccaccagagcactttcgcggaaacccatggcaatggcaaatggaaaatagatggtcggtagggccaccagtttgataaaggtggcgatcatggtcggtttcagtttcttgatggctttgcggccttcaaaaccggcacctacagcaagcagtgccatcggcgtggctgtctgggcaacatttgtcactgtttttaataccagaggcggcagctcgatattcagcagagaaaaaggcacacctgcggcgatgccgagaatgatcggattggtcaggatatttttgaaggcgcgtttgatggtggccgctttgtctgagtgatcctgattgttggcgcaaaacgtcagaatgatgacggaataaatattgtacagaggtacggcagaaacaatcatcagcggtgtcataccggaattgccatagatattctggacaaaggcaatgccgagaacggcggcgctgccccgggcggaggcctgggtgaaagcgcccaccatagacttgtctttcataaagatgcttgtcaatgcccagatgcccataaacatgatggtggtgccaatcatacagaaaatgacaaatttcgggtcgaaagcatctctgatcggtgtggtggcaatgtctttgaacaacaggacgggcaatgatactttgaagacaaacttgttgatgatatcaacaaaattctcgttgaacgtctttttctgcattaaaaaccagccaagaacaataaccagaaagaccggcagtgttgcattcaggctgaacataaaattactcattggttaaaccctctttttctttgaaatatatctcctgatgtttagagtaacattcacgctgtctgatgtcaatgcacacagaaagtatctgatgcatatgctgatatatgaatttggaatggtgggtataacagatggccataaagatatttattgatcagggacataatccttcgggcccgaataccggcgcagagggctttggactgaaagagcaggatataacttatcaggtaggaaaagatttggcagcgcttttgcgggcggatgaacgttttgaagtccgcctgtcacggaataccccggaagaacgtctggggaccagcaatgcgacaagtctggcggcaagggtgcgagcggcaaatgcatggccggcagattattttgtcagtattcatgctaatgccaatacagattctgctattaatgggacagaggtctatgtctaccgcaaatatactcagtcctattatctggcacagcatatattaaatgccgttgttaatattgtgggaaccaaagataatggcgttcgggcaaatccgtcgctgtatgtgctcagaagaaccaacatgccggcggttctggtggaactggcttatctgaccaatgcaggggatgcagggaagcttgagaccatgcagtcggaattcgcaagaggtatttatgaagggatgctcagctattttggcatggaccagtaattggagcataaaaataggaaaaataaaaatatggcagtgaaaaaagtcgatacagatgtaaacatgatataatgagcgttagtgagagggagcaagcaatgcttgttcatcgcgaacggcgaatggcgatcatgatataaggcgaatggcgatcatgatataataggaaacaaatgataaggcattgaaggaggaatatcatgcggtataagaagtttggcaaaacaggactggaagtttccgagatttgtcttggaacatggggcatcggtggcgccggatgggatgcacactcagatgaagagagaatggatgcaatcaaagcggctcttgattgcggcattaattttattgatacagcaccggcgtataatgcaggaagagcagagcaatatatcggcgagacactgcattgtctgggggcccggaaacatgttattctaacgacaaagtgcggcaataaatatgtggacggtaaatatatccgctgcggctcggaagcattgatccgcagacagtgtgaggagtctctcagaaatcttcagacggattatattgatctgtatctggtgcactggccggatccgaatgtatcgatggaggaaaccattggtgcggtggctcagttgaaaaaggaaggcaagatcctgcatgctggtgtttccaattttacaaaagaacagatagaagaggcgggaaagtattgtgaaatcgaggcctatcagccgcagtactccatgctggacggggataatgaggcagtcattcggtgggctgcggcgcaagatatgggaattatgagttacgggacccttggcggaggtattttgacaggaacatacagggaagtgcgaacatttggcgagacggataatagaaatcgcttttatccatatttcagggagccacttttttcaaaggtcatggaactgctggaagtgatggatgccatagcggcggaaagaggcgttccgttggctcagattgctgtgaactggacattgcagcagccttttatcacgtcgtgtattgcgggggctcagagccggaagaaggtggaggaaaactgtgcaggacttgaatggcagctgacagaggatgaaatgcacagactggatcaggcaatacaacgatatcaatttcctgtccaatgcggtgaagtttatcaaagaaggtgagattattgtggagagcgttccggataagggctctgatttttcggtatttcttcgtttgccggaggcatccatggaagaacatgcggatgtgcagacacagacagccgtgaagaccgaagaggcagattatgaggatgctttccgaggtcgccgcttctgttagcggaagataatgagatcaatgcaatgattgccatagagatttagcaggaaatgggtgcttctgtcaatcttgctgagaatgactcgtgctatgaacaggtcagatgccggcacctttgacggtgatgattcagaaataagaaaagccggagacaggttttcatccaataaaaaggctgtgaagaatgaatcagaaacgattcatctttcacagcctttttggcgactagttttaaaggcaatttgcctttttagtgtgagttttctttgctcgatgaggtatcagaggcatcagaagctgcttttgggtcattggcttttgaggcatcaaagtcttttggtatgaagacattatcaggattgatctccggaatgatgacattagacaaatcagtctttaggtgctttttatagagcatataatcaaagatatgattcatcagataaacaagtacggcgataatcggaacacccaggaacatgcccacaacgccgcatgtagcgccgcctgctgtgatggcaaaaataatccagattggggaaagtcctgtggaatctccgagaatcttcggaccgaggatggttccgtcaaactgctgcagcaggaaaataagaatcaggaaaattaaagcctgtttcggagagatgatcaataaaatgatcagtcccggaatagccccgataaatggaccgaagtacgggatcatattggtaatgccgacgatgatactgataagcagtgggtactgcagatgcagaatgcacatgagtacaaagcagataatgccgatgatcagcgaatccagtgctttgccgatgatatactgaccgaagatgtggttgcattctttaattgtgaaaatgaccttataggcggtctcctggtcaaataatgcatagataatgcgtttcatactgtggatgatccgatgcttgctggacatcagataacacgaaataacaaaggccagaatgatattgataatccaactgataatggacataccggcattgtagatcatcggtacgatgtcggtcatcactgcctgaaccgaattgatagcattcggcagcgcattgttgatggtgtcgatgatataagcaaaatcaatattcgggtaacgttcattcaacagattcagattcgtcatgatcgtgtcatacaaagaggatgactgacgaatcagttccagaatactttcaacaatctgtggaataacaaatgtcagcacaagggcaataaagccgatgacaatgacataggccagcagcagagaaagaaacttgtgcagctttgcaaacttctgaggggctgtccggctgaaaaggatgtggtcaatcctgtttaccaacgggttgataaagtaagcaatcagaaatgcaatcaaaaatggtgacaatgtcgataaaatcgaagatgtatagatctgcatatctctccagttgttgataaacttgaaaatgatcaggcagattgtaaaagttgcaactacataagtacatatggaaaagtatttgttgttggattcaaacttctttttctttccggaacttttctcggaattaggagcgggctgccgtgtgtgttctggtaacgccataatgtgtgtttcgcctccggtaaaataaatatagggacagaaccaggcatctgttgggatgctttggtcatcaaaagatactgtttctattatatgcgctttgatatgctaaatacaagatgcaaaataaatttttgccaaaaacagataactaacagatgatgaaagcgatgatagaggacgggctacggtcagaaaagggtgctgtgccaacaggaaaaaggaaactctgaaaaaaatttgaaaaaaacaaaaaaactttaaaaaagttgttgacaaaaagagatttctgcggtaagattaatagcgtcgctgaggtaatcacttcggatgacgggtaagcgcttttagctcagttggtagagcacctgactcttaatcagggtgtccagggttcgagcccctgaaggcgcatcaaaagcactgtttttgcagacataggagctgcgggggcggtgcttttttcgtgtttggaaacgattgagcagattttgttacaaatctttcaaagtgtccactttatagacaatcttggcaaaagtttgtcggaataatatgatgcataagacatggtgaaaccttgattttactgtgtcttatctgctttatgtaacatttttcaaaataataaaccaggaatcaattgtataaatatcagtacattgttaattgtggtgtcaacaatagacacattgaaggctgtgtctgatttggccaaattaggtgttccatccttcttgaatcgtgctataatgattgtacagaaaaaaatacataagtaacggccattacttctatgcaatatctactgaataaaaataaattgtagtaaaagcggaggtaagattatgattaaagtgaatttacagaatacagcagttcagaacatgttaacaggacagaacacattagacagtgtatttatcgatggcaattcaatcttatttatcgagaagccagagtatctgaaacagctttacagagatgagatcaaagccagagcaatcaaagtcaacctgaaggtggcaagggaagaaatccacaagaggacgcaggatgacagatacaacaatctggatgatatggagaccttgaagaagttcagagcacagaccgatgagttgagagagacagagaaagaatacagacgaatgctcggtgagtgcgagaatgtgaagatgattcctgtttacagcggcacgaagctggatgttacaaccggtgatagtgttgaagtgaaacaggctgagtttgaagattatattgaaactgagggcaacaaggcgagaatggtactggatatcctggcgctggatgctgacagacttgagagagactgtcagtggcttcagacaaagggatgcgacatcaacatcatgacaacaccgggggttccgctggcagttgaaggcggtacactggaagaggccattgcggcattgattgagaaaaaggcagcataaataatatgtttgcaaaacaatctgaatagttacctgaatttcatattagaatccataaacattgggcgttatgaagatataacagaggtgtctgtgattgacagaaaaagtcagtcacgggcatcttttttgatgtctggatggcctggagcattactggaatggcctgcagcctcagcagagccattgactttactcagtgaacatgctaccatatgaaaagtatttttacttttaatatcaaaggagtttgtatggattacgttaaaaaatatggcgaattgatcaaggataaagcaggtgtaaagcctgaacgtgcgcgctccatgattcgtctgggactgcgtgcggagaatgcaagaacaaaactgcttccgaataaagagatgccgaaggcttttcgtatgctgacccatctggcgatggaaagtgtgttaaaggctctggatcatccggagaaatcctgttggacgaatatttttgccccggtggagattatgcagtgctttggtctgcagtgtgtgtccatggagtgtctgtcatcatttatgtccggttttaaaatagaagattatctcattgattatgcacagaatgagggcattgcttcaacactttgttcctatcacaagaattttatcggtggtgtggattccggtgtcttgccgaaagcagccatgtcagtgactacatccatgatctgtgatggcaatatcaacacatttcggcatatggaacagaaacatcaggtggaaagctatgtgctggatattccgaatacttactcgccggaagcagagcgttatgtggtgggacagcttcaggagctgatcgaattgctggagacaaaaaccgggcagaagctggatatgaatgagctgaaggcggcaatccaacgtgaaaatgaatcaaaagaatattacaaagcctttttgaaagaacagaagcacagatattatccaaataccatgacattggatctgtatatgctgtttgcctcacatttgaatatcggtacccgggaaactctggatttctttaaatgtctggcagaagatgtcaaaacttatccggaatttaatggaaagggcattttgtgggtacatctgatgccttactatcaggaaactttacagcaatatatgaattatcaggagaaatactacattcaggcctgtgatctgaatctggattacatggaaccgttggatgcagcacatcctctggaagcactggcaaaaaagatgattttgaatatttataatggcccgtatgagagaaaggttgagatgatacgtcatcttgtcaaagaatttcagtcggatgcggtgattcatttctgccactggggctgcaagcagtcctccggcggcgtgatgcttttaaaagaagccatgcgtgaggaaaatgtaccgatgctgattcttgacggagatgccctggatcgaagaaacagtcatgacggacagatcaagacgcgtctgcaggcctttctggagctgattgacaatattgaggaggacaaggactgatgattggatatgtatgtaaatatacaccggtggaagtttttgaggccatgggtgtcgaaatcagacgaattcagccggaagtgaccaatttcaaccaggcagatacattgatgcatccgaatatctgctcatttaccaagtcagtgctggaggatgtgctggccggggattatgaaggggttgtacttactacatgctgtgacagcatccgacgtctgtacgatgtgctgaaacagcagtgtccggataaattcctgtatctgttggacgtgccgagaaaagtaaatgatttttccacggatatgtatcgcgaaaatattctggatatggtgcatgcctatgaagcgttttcagggaaaacttttgatgagattgtattaaaacagctgctggaacgccgtgaagcggggcagaatcttcgaaccgcaccgaaaaataaggcttccgtgcatatcggtctgatgggtgccagatgcagcaagggcattattgatttgttggaaaacagaggcgtggatattttatttgatatgacctgtacaggtcttaagcgggaatttcatgtagaaccggacaatctgctgcaggcttatgcatggcagctgctgaatcaggtaccttgtcttcgtatggtaaaggcggtcaacagagagaattatatggaaggtttcagggatcggttggacggtattctttatcatacagtgcagttttgcgataactatgcctatgagtacacagatttgaagcatcgtttggatatcccgatgctgatggtggagacagatgccaccaagcagtgtgagggtcagattcgaacgagagtggaggcctttattgaatctctgaaaattgcgaagggtgcctcaattggcaaaaagagtctgaaaaaagcggaggatggaaaaatgtatgtacttggtattgacagcggttcgacatcaactaatgctgttatcttaaatgagaataaagaaatcgtggcttttgatgttgtccgtactggggcgaaaagcggcgagagtgcggagagaattttgtcggaaattcttgaaagagccggattaaagcgggaagatatttctctgattgtgtccacaggttatggccgtgtcagtattccttttgcagatgaaaatgtgacagaaatcagctgtcacggacggggcgcacattattttaatccggatgtgcggacgattctcgacatcggcggccaggacagcaaggccattcggttgaatgaaaacggcgaagtggtggattttgttatgaatgataaatgcgctgccggcacaggccgtttcctcgagatgatggcaagaacactggaaatggatatcagtgaaatggggccggaatccctgaaatggaaggaagacattgatatcagcagcatgtgttctgtttttgcggaatcggaagttatttctctgattgctttaaataaagaaaaagcggatatcgctcatggtctgcataaagccatcgccaataaatcctattctttgttgaaacgtgtcggattaaatgagacatttatgatgacgggaggtgttgctaaaaatcctggtgttgtcaaagcggtggaggaaaagcttggcagtaaactttttatctgtaaggaaccggagattgtgggcgccctgggtgcagcactttttggattagataagtaatggtaaaaatcgcagcgatatttgagaagctcgaatacgcagtgagaaaatgaccggcggtatttgagatgcctgaatatgcagtgcaaatggttgcagtgcatttggaaacttgatataatgaatggacagtcagtgactaataatagaatatgtgggggaaatgttatgagtcaggcaaagatattcaaacttttgtcagaagcttatggtttgacatggagcggtggtattgcagcggaagtgattgacggctgtccggtgacattgaaagaggacaggtattatgttcaggtgagtgcctatatgccggagagggtatatgaggcgaaacatgagatcttcaatgagcagatgaaggcagtcaaaggggtcaagtgcgggtttgataagaaaacaagccgcataaccacagtattgtcacagccgaaccgtgtggtggagcagtatggtgcgctccgcgagatcatcaaacagtacgcagctccttatgttgaggaagacaagtgtccttactgcggacagggcgaatgtgatatggcagctatttataataatcaatacaggcgagtccatgtgcggtgtcatcagtatcatacagacaggacgagggatgttgtgttgtccggtcagggcaatctggcaatgggaatcatcggtgctctcgcaggtgcagtgctctttatggcgattgcactggcaatcggcatctttgcagaaagatcttatggttggttttttgtcctggcaacgttcgcagcgttaggtggatacaagctgttccatgggccttacggaaggaccggcatggtgacagttaccctttgcagtattctgtcaatggtattgtatctgttttgtgaaatggtctatctcattgcacagtactatgagctggccatcggagaagtgctgaagcaatggccggcagtcattcagattgctttctcgccggataatctggcagaatcctggttccagcttatcttcttcctgggtggtctggcctggttcctgatcaagcggccattgtccaagcagaaggttgtgggcacaatggatgtgatggatgatttcaacagggctttatagaagtgcagaaattcgaataagaaataggtctgcacagcggacttgaatttcgctcaggactcaccagagagtcttgaagattacaaaagataaacaccatgacgatttgaagcgccatggtgtttgtcttttgtgcatgtaaaaacttgtctttggtagtttgataaagcagttgtctttggtaattcatcttttgtgtttgctaatgaatcatttgcagcttgcaatgtatcttttgtggtttgcaatggatcatcaggagtgagatcttttgtgttttatgagaagtctttgtctttcgtgttctaaagaggataaagggattctctcatggtaactgcaaagtgctttatctttggtgttttgtagaagttttatcttttgtatgattgaattatagcacaggtttcgtgacaaataaagtcaaaatgtgtaacatagttatataaaagttgtaacataggcgaaaaggtgacaaacatttcgctgtgttttaggcttgtgtcaggtaggctgaaaatggtatactagatgcgtgatgtcctgcgcattgaagtgtgggacaggcaaagagaaagaagtttttaacggtgatggatggcagattgcgaaaacggaggtgacaggatgccgggatatgtgattcatctggcagaggcagaattgatattggacaagatgcgtaagctcaggcagactgatgatgcctttgagcaggcttttcttacgggtaccctgcttccggataccagattaaaaggggaaaagcgtttttcacatttctgggacccggataagctggaatgtctggcactgggaccggatttggcccgttttacagataaatacgggcagcggctgaacgagccggtgatgcttggctatctggcgcatttgcatctggatgcccgttatgtgacggaatactggccgacagttatggccttttatggctgtaccggggaaccggaatataggaaagcccatattgcggaagtggagatcaaacggcttcagaagtgcgtgccggtgagtcagtttttctccattgattattattatggagattacacaaaactcaacggttactttattcataaatatcacctcagagtaccaaaatggcagagcattccgatgtcgccgccggaggaagttaacctgcaggatatgcagatgatctgcagagaactggatcatttgaagaaggaatgccatgccggcgacgagaagagaatacaggtctttgaacttggatcattggagcggtttatggcagcctcggcggaggaattttgtgatagctacatttaacgattaaccaggatgaagaaatcaaggagggaagataatgaattatattttgacagctgcaacggctgtatccaaggaagccggttcaatgagcgaaatgctgccgaagtttggtgtcattgcccttgtggtagtgattattttaatcggcatgtttatttatgcgaagaaaaagaaataaacattagaaccaattgccgcagcatgcatagaataatgaaaaagggtgaaaatatgcgccttttcttcacaaaaatgcatggattgggcaatgactatatttatatggacggctttgacagtcggatgtcaaagcctgcagcatggccgtcggagcaaaaaggtcggctggcggttatgatgagccggaggcatacgggaatcggtgccgacggcttaatttttattcagccctcagaagaagctgctttccggatggaaatgtataatgctgatggttcaaggggtgccatgtgcggtaatggtatccggtgtgcggcacgctatgcctatgaccatggcattagcacgaatcagtcttttcaggtgcagactgacagcggcataaggtccgtttatatcagaaaaacggatgaaggagagcatataacatctgttcgggtagatatgggtgtaatggctaaccttggggagcagagagtcctgttaaaagcaaaggaagaatggacagattttacaggcggcagctttccggtgcagtatgtatcggcaggcaaccgccattgtattttctttgtagaaaatgtcgaagcatttccgctgaagaaggcagcggaattgatccataccttgcctggtaatgaagacggcgttaatgtcgaagccgcagccgttgaaaaaatagccgtcaccggagaaaaatacatcaaaatgagagtcgttgagcgtggatctggagaaactatggcctgcggcaccggcgcctgtgccgtgacagcggcggccgtatggcagggatattgcagatatgatgaaaatgtggaggtcaggcagcccggaggcatcttaaccacagattatcttgccgatgggcggatgctgatggaggggccgacggaatatgtttttgaaggatattttgacattcccatcgcttcgttttataatggcaccagataataaataaaataacagggaaactgtgattcagtggtagaatcacagtctccctgttgccttcatatgaattaatcgacaaaattaaaatcgtctttgaatctctctttgaatacttcaaataccttgttcagtgtagttgcatcctcaatgctgaggtattcttcgttttcttcatccagagggtggacttcaaggataattacttcaccgtctgcattttcatcttcgctttcaaccggaagaagaacaacatattccttatcatctaagtcaattaaatccagaaattcaaaatccttgtctgtgccgtcttcatcggtcagtgtaataatattcagttcttcttcgttgagagtttcatcaaaatcgctcatgttcagtcctttcttctgaaggctgtggcttcagaaccatcaataattaaaatttcaggctgtttcacaggtattataccatggcagaacaaaatacatcaactgattttattgctatttttttgtagttagaatataattataatattgttcagaatgttcgaaaggaggacatggattgaaagacgcaataggagtcattggcggaatggggccgctggcctcacagcttttttataaaatgataacagaacatacggcggcagaatgtgatcaggatcatgtgccgttgcttattttaagtgatgtgacgatgccggacagaacaggggctattctggatggaaaatatgatgcaccttataacagactgatggaggatgcgaagtttttggaggaatatggctgtacggcggtggttgtgacatgcaataccgcacatttctttatggatatgattgaacatgaactgagaattccttttatatccatgatcagggaatcagccaaagaggtggccagtcttcatccgggcagtgtcgttgcggtattggcaacggatggaacagtgaaagcaggactgtaccagcgtgcattggaggccgaagatctgattccatgggtacctgatgcagatattcagaaagaagtcatgtatcagatttatgatcgtattaaaaaagggctgccatgtgacaaggcaagctggcagaagatagaagatgcctgtttggaagccggatgcagccgtgtgctgctggcctgtacagagctttctgtgattaagaatgatgaaaaactgtcagactggtatattgacccgatggaaattctggcaaaaagagtaatagaattctcgggaaagaaataccaataaacacgatgtggaaagtttctgaataatcattgcgtgataggtgaattgccaaaaatctatatggcaatttttgacaggatagggcaagtttattttaaattatgttgcactttggccaaaaaattgctacactaaagagtagagtcgttgcatcatattaaagcggtaacccgtgcttaaaatgtaactgttcatagcgctgtgaggcatttggaagcagggtttggacggtcgatttgaaataattaaatgaggtggaaaaaattatgaacaatccgattatttctctcgagggagtcgagaaaagattcgggtccaatctggttgttaagaaaatgaaccttgagatagctgaaggtgagtttctgacacttttagggccatcgggatgcggaaagacaacaacactgcgtatgatcgcaggttttgaggaagcatcagccggtgtaatcaaggtcgaaggcgaacgtatcgaagacaaggagccgtttcagagaaacgtcaatactgttttccagaattatgcattgttcccacatatgacggtttttaataatgtagcatacggactgacgatcaagaaagtaccaaagcctgagattcagcaaagagtcatggagatgctgagacttgttcagctggaagggtttgagaagcgtaagccggatgagctttccggcggtcagaaacagcgagtggcgattgcaagagcactggtcaacaaaccgaaggtactgcttctggatgaacctttgggtgcgcttgacttgaagctgcgtaagcagatgcagattgaattgaagcgtcttcagaagaaactgggaattacatttatctatgttacccatgatcaggaagaggcattgaccatgagtgatcgtattgcggttatgcatgatggcgttctggaacagttagatgtaccgatggagatttatgagcatccgaagacaaagtttgtagccggatttataggcgaatccaatatttttgatggtaaggtgacagacaagaaagacaatgtgctgactgttcagacagaggctggtatgatgcaggtatgcggggctgattttgaagttggcgaggagatgcatgtggctatccgtccggaatatatggatgtgagcaagacgcctgttgaaggatttgatctgcctggcaccgtgaaggattttatttatcagggaacggttgtcaagacagccctcgatattaagaacggtcaggagattaagtattctcgttttgagcaggatacagatattgcagaaggcaatcaggtttatgtttactggagacctgagaaggccgttgccatcaagaagagtatgtagggggcggtctgatgaacaataagaaaaagaagaatatgcttccggcattggccatggcaggcccggtatctgtctggatgattttgtttgtgaccattccgatgctgtatattatttatatcagttttatgtccagaggtgtattcggtgatgtcgtttataagttttcgacagaaagctacaaaacgattcttaatcctacatattttaaggttattttgaagtcgctgaaagcagcagggattacgacgattctctgtctgctgttgggatatccgttggcttatattattgcccataagccgaaggatacagctgcgaagctgattacgctgatcatgatcccgttctggacgaattcattgatgcgtttgaacagctggctgcttttgttccagacaagtggtccgatcaacaatttccttgtgggaacaggcattgtcaaggaaccgattacatttatttatacagatgggttggtgctgatcggtctgattaccaacatgctgccatttgcggtgcttccgctttacagtaccattgagaagctggacaagtctctgattgaggcatccgcagacctgggtgccagtgcagccactacattcatgcgtgtgacgctgccaatcacatttccgggtattttttcagcgatcatccttgtatttatcccgagcctgggtatttacaccgttactgatatgctgggcggcggcaagatcttatacattggtaatattatcaagaaccagttcggttccatccgaaactggccgttgggtgcagcactgtctgtaatgctgatcgttattactatgctgcttatcttcatttatacaagatttgcgaagattgaagatatggaggtagtataatgtcgaaaattgccaagaaaagaaaaagactgaatatcatcagtaatgtgtatgcatttctggtgtatgcccttttgtatattccggtggcagttatgatggttttctcttttaatgaccagaagtataactattactggaatggttttaccacacagtggtacgccaagctctttaccaattctacattggtggacagtttgatctacagtttgatcattgcggtactgagtactctgatttccgtatttatcggtaccatcggtgccctcggtttgaagcggtatgaattcaagatgaagaaattcatcgacaatatgctgtatattccgatcatcgtgccggaaattgttctggcggtggcattgctgattattttcctgaaagtcggtgtgtctatggggatgggaaccattctgatcggtcactgtacattctgtattccatatgccatcgtcaccatcaaaggacgtatcagcggcgacaacgagactttggaagaggccagcatggatcttggtgctaaccgggtacagaccctgcttcgtgtgaccctgccgaatattttcccgggtgtcatgagtgcggcattcctgtcctttacaatgtcatttgatgacgttgtcatgagtaatatgctggcaggtgccaaacagtccacattgcctgtcctgatcctttctatgaacaagacaggtgtaacgccggatgttaatgcattggcgacaattatggttcttatcatcgtagcagcgatgattttgaataatattattcaaggggcccttcataaaagggtaaaataaggaggttttcattatgaaaaagagattactggcaactgtccttgccggtgccatggttttatcaatggcagcatgtggcagcagcaatgccaacaaaacagaatccgcagcagcatccgaaactgcgaatgcttcaacagaagccggagcagaaggcggtgaaacacaggcagctgctcaggaaggtaatgcaagctctgagctgaacatttatatgtggcagcagtacatttctgatgatctgatcaagaactttgagacggagaacaactgtaaggtgaatctttcttacatgagtgataatgctgatgccatcaataaattgacagcaggcggcggtgatgaatatgacctgatcatgacatgtgatgcttacatgaaatccctgatcgcaggagattatgttgaagaactgaatctggacaacattccgaattcatccaacatcaacgatacatactgggtatccaagggttactgtgtaccttatctgatgaactacatctatgttgtatatgattcagaaacatgccctgttgaaatccacagctacaatgatctgcttcagtccggtctgaagatttctacaattgatggtgcaagaaacctgttcccaatcgcacttgttgcccttggctatgatccgaattccacaaatgaaagtgaaatcgcagaagcttacgaatggctgcagaagttcaatgaaaacgttgttgcttatggtaatgcagaacagaacctgacaaatggcacagcgaatgttgctgttacatacgatggtaatgcttcatgggctatgaaagaaaagaacacaatcaaagttgcagatttcacaagcgatccgatccagcttggtattgacctctttgttatgcctaagggtgcaaaacatgtagatcttgcagaaaaattcctgaactacatctgcacagctgaagttatggctaagaaccttgaagagttcccatactcctgtccgaacgatgcagccgttgcagcagcatctgatgattacaagaacgaccctgcaagagatttctcttacaaggaaaatgtattcttccaggaagatgttggcgatgcgctgacaatctacaacgactactatcagaaacttaaagttggtgaataagccgatttgatgatagggtggaccgctcttctgattgaagtggagtgcggtccactgaatgaataacagaaaacgaaaggagcttatccttacgctggaataagctctttttgttttctttttttgtgtttttcggctgcacgccctcttgggccattgaacagtcaaactggcatcaaagggagagggattagggtgaaagaacaattcattattttgtccatatttctaaggtttttaattagttatgtaggaaaattatttgaggtttctgagacgaaagatcttatttatatagacaaatccttcgcagatgaatatgcaggttccgtttatactcaaaaattaagaggtgctctaccgaaagtgaaagcaaatatgtcacaaggaattccggaaatgatagaaattgcaacggaaaaacgatggaaggaagactttcaaggcaagcataagaaaagagctggaaaaggatggtttcgttataatacacgatttgctttaccagtagtgaatgagaaaggagacattttggaatataatgtttatcaggcagtgttaattgtaagatattcatctgatgagaagttatatttgtacgatatacagaacataaaaaaagaaacgagatacccatcttggacaagatcgtcagatggtcagaaacccgtttcctttcattaattataatataacattttattaaatgcaatagaaaaattttatggtatattgattgtagttcgcttggtagggaaaggtagagttggagtgtttgacccatattaatattaaatgaaatctatagaagcgttatttaatgcatgacagcgtggttccgaataaagaacagctcattgcacaggtagaagctgttttcgatgaatggcacaagccggaaaagaaatgatatatgacatatactttccacaatttcctgatgaaaaagcttgcaacaaagacttaactgatgtatgatgaaataggttaattttttgacagtatttaagaaatggagataaagattatgctgaaatttgatgaacagaagcagctggacagcgtcaatggtgctctggctcttcgcggtcgtattgaagaaattgttgatgctatttgtgctgaaggatacaagaatatctgctggcttggcattggcggtacatgggcttctgctctgcaggctgaagtgcatatgaaggagaaatctgctattgaacttttctcagagaatgcagctgagtatgtgacaacaggcaacaagcgtgtcggcaaaggcacaattgttattctgtcttctgttacaggaagcacgattgagatggttgaaggtgtgaagaaagcacaggctgacggtgctaaagtatttggtttcattgataaggcagaagctgaactggcgaagatggtagattatgtgatttcctatccggccaatgaacagctgaagttcttcatggttgcagaccgtttcatgaagaatgcaggcgagtttgaagattacgatgaatattatgcagaaatggatgcacatctggctcaggggcttgtagatgtagagaaggctgcagatgcatttggtgctgcttacgctgaaaagcactgcaatgacaaactgcattactttgtaggtgccggcaatcagtacggctctacatattcttatgcaatgtgttattgggaagaacagcattggctgcgtacaaagtctatccacagtgcagaattcttccatggtatgctggaagttatcgacaaagatacacctgtaactgtatttgtcggtgaagattcccagagaagactcagcgaaagagttgcagcattcctgccaaaggtatgcgccaactacacaattattgatacaaaagattatccaatcaagggtatcagcgagaaataccgtggtagcatcagtcatctgatcagccatgcagttactcagagaatcgatgcgcatatcgagaagatcaactgccacccaatggagatcagaagatattacagacagtttgattattaaaatatagtaactgttcagagccaacctccaaaatgctatgcatttcgtcggtgtggcgtatccgccaaataaaatttcaaaaacagttttaaaaatgcaagcattttatacctgttttttgaaattttacctggctctgaacagttacaaatagtgatagaaaagaagaagcattgtacctgcaatcacagagacaatgcttcttcttttgtcaagtagaaaggaaaatttatcaaaaattaaagttatacggcattaaatccagcatcaaaagccctggcattagactcgttgaatttggatttgccttttttggcaaacatatggttcatagccaacagcagatctggtgtttctggtgatgggttgtagatataaccgtcattgctgtatttgactgtacagttggctgtaccgccacgcatagcggaaccataggatggtacccatgtgacgtgaataccttcacttgctgcgatatcagagataatcaggccggaagtaaggacaccctggccgccggagcctgcaaatataatttctttcatttatttggcctcctctctcctggtgatgaaggcgcttaggttggcggtatgtgtattgaaaatgcggtggtgttcgtgccgttaaacatggtacaggtaagacaagaaaaccttacatgaatctgcagtatacaccgcatgtacttggtatcatgaagagcatcaagaaagcctttgacccgaacaacattctgaatccgggtgttatcatcgatttagataattaatgaccataaataagcaggttttgctatataacttcctcgaccaatgatattgaccaatcatcattgaacatttacacaaaaagacgattcgctggaaatcgtcttttttgtgtgcagcaaaacctgaccttgtatatctgtttgttctatattaaaatagaagtattatttattatttaaagtagaaatactaaaatgaaatggaaaggaaggtggcagaattggagctggggttttttacgagtggctatcagcggtatccgttggagcaggcttttgaggatgccagtcgttttggctatgattatatagaattatggggcggttatccgcatgcgtatgtggaagatctgacggcaagaggggttggagaaattgacagactgattcaaaaataccggatgtctgtgaaatgttttacaccggagcacaatggctatccctttaattacatggctggagacgaatttcagtgggagcgatcaatggtgtatttagagaaagccattgagctgacagcggccatgggcgcaccgatgatgcttttctcggccggtcatgcagggtatcagatgacaggacatgagattgaagaacggcttcagaaaagtctggaacgtttgacagcaaaggcagagcagcagaaggtgaagttgattttagagcctctgacgatttatgaaagcaatgttattacaagtctaaatgacctggaacgggcattggataaagtcccgtcaccgtatctggtgggcatgtgtgatctggcggtgccatatacaacaggtgaaccggcagcggagtatgtcaggcgtcttggcggtcgattcgggtatctgcatgtgattgacaacgatggcgtcagtgacagccatattctgccgggggatggcaatatgccccttgaaggaatccttcgggaaatcagaagggccggatatgatggctacgctaccattgaactggtgacagggtatctgaaagaaccgtcggtgtatgcggagatagcgataaaaagaattaggagtattttatgagagaaaacaaaatgaagaaaataagaattgcagcagctggtgacaactgcatggatgtttacgataaagagaataaggcttttccgggaggcaatcctgtgaatgtggcggtttatgtggcacgtcttggcggtgcgtccgcctatatcggaccggtggggacagatgtctacggcaagcagatgatggatgccattcagggcaaaggtgtggatgtttcccggatgaagatacttgagggaacaactgctgtgacccacgtggagattgtggatggcgacagagtgcttggtgattatgaagagggggttatggccgatttcaagctggatgcggaagatattgatttcctcagtagctatgatatggttgtttccggtctctggggcatgattgagaatgatctgccggttttgaaggaaaaaggggcaatagtagcctttgattttgccacaagaccggatgatccggcatctgtcaaggctattccgtatgtagattacggtttctttgcagatgatgacaaggatgaagaagaattgaagaaaatgctgatcgacctgcatgccaaaggaccgaaggtgatggttgttacccgcggcgagaagggcagcatggcttatgacggcgagaagttttattatggtggtattgtgccttgcgaagtggtggataccatgggggcaggcgacagctttattgcaggatttctttatgctatctgcgagggaaaaggaattcaggaagctatggcggacggtgcggctaacagcagtgtgaccattgcctattccggcgcttggtaggatacaaacagaaacaggaatttgagtgaataatgagccaaaacctatgtgaacaataaaggatagaatgcggcgatacaaatggtattaaatttaagaaaaaatatactgattttgaatgatttgtctatatcctgccggctgattcgttcagacagacgttccgtggggcttgagataagaaaaattccggagggcggagcggaacttctgattcgtgcaccaaggcggatgaagatagcgtatattgaatggtttatcaatgaaaaagaacggtggataactgagaaatatttggctgcacttgtggaaaaaccacgtccgcaaatgatgaaaattccggaatatgtgacggaacaatggcttcggacagaaggggctgaaagattccagcaaaagacggctttttgggcggcaagaatgaaagtgacttacggcaggatcacgatccgtgatcagaaaacacggtggggaagctgtagcagtcggggaaacttgaattttaactggcggctgcttctgatgccggagagggttatggattacgtgattgtccatgaactggcccaccgtcgggaaatgaaccattctgcggctttctggcagatcgtcgaaacgtatctgccggattaccgggaacggcggcagtggctgaaagaaaatggtgttcggtatgccgggcctgttaaactgccgaagtactagagtaagcaggcactgaaattttcagatgaaatgactgtcgaattcggctaagcggccacagactttttctcagggatttgagaaagcataatagcggcaaacatcagcagacagccgcagagttctttcggagacagatactgatgcaggataatccatccggctaacaatgaaaatgcagattccagactcataaggagtgaggcaataacgggatctgtatttttttgtgccacgatctgcagcgtataacctaccgcacaggaaagtacacctgcataaaggagaggctgccatgctgtcagaatggcatggagattcggtgattctgtcagcatggcaggtatgccgcagatgatgccgcaggtgaaaaactgaatgcaggacatgcggacaccatcgacttttggtgaaaaatagtccaccaccataatatgaaacgaaaaacaaaaagcgcagataaggacaagaatatcaccttcgcctagggaaagactttctgtcatgcagagcaggtacaggccgatgacggagagtccgacactgatccaggcaataagacggactttttttcccacaaaaaggccgaggatcgggacaatcacgatatacatggcggtgataaatccagccttgccaacggttgtgtagacaatgccaacctgctgaaaagaactggcaattgccagaaggataccgcagacaataccgccgatgatcagtgttttcttgtcagatacggatgaggaggatgtcgatgcaatgtcggtggcagaggccgcatcactgttggaagcgttgacggttgctgcggattgtcggttgactttgtcaagtaatggaataaaaagcagcagaacaaaagcaccgataaaatttctgacagagttaaaggtaaatggaccgacataatccattcccacactctgtgcgacaaaagcaacaccccagatgaaagcggtcaataagagcatcagattgctttgcattttttttgaattcatatttgtctctcctttaggtgatcatctattattcgtcaaggcacatgcaggctgtttttgttcggtatcggtatggataaagacgtaaaacatgtgctttttgatgttttatagtggtaaagtatcgtaataaggtttataatagcacatgtatttatgaaaataaaagaaaaatgcataaaatttgaaaaaaacacttgattatcgacaaaaatagtgtattttatgtaattaggaaattatttcgaaattgtcggaggattaaatcatgaagatcgttgtaaaattcggcggaagttcccttgcaagtgccgaacagtttaaaaaagttgcggatattattcacgcagacccacacagaagatttgttgtcccttctgcaccgggcaagcgttttgatggagatacaaaagttacagatatgttatatggatgctatgatctggcagaagccggcaaggattttgatggtgcattggcagacatcaaggcccgctatgatgaaattattgaaggacttgggctggatctgacactggacaaagagtttgagacaattcatgaacagttccgtctgaaagcaggaagaaattatgccgcatccagaggtgaatatctgaatggtatcgtgttggccaattatcttggttttgagttcattgatgcagctacagttatccgttttgatgatgcaggcaattttgaagcagacagaacagatttgattttgtcttcaagattgaaagatgttgaatatgccgttgtgcctggtttctatggggctcaggatgatggtgtggtgacaactttctccagaggcggttctgatatcacaggttctatcgtggcaaaggctgtccatgcggatgtatatgagaactggacagatgtttccggtttccttgtggcagatccgagaattatcaagaatcctgaagcgattgaagcaattacatataaggaactgcgtgagctttcttacatgggcgcatctgtactgcatgaagatgctattttcccggtacgtaaagagggcattccgatcaatatccgcaacacaaataagccggatgatctgggcacatggattgtagaaagcacatgccgtaaaccgaagcatacaattaccggtattgcaggcaagaaaggctttgcatcgattaatattgaaaaagatatgatgaactccgaaatcggatttggcagaaaagttctgcaggtatttgaggataataatctttctttcgaacatatgccgtcaggcgtcgatacaatgactgtgtttgtacaccagtcagagtttgagcacaaagaacagcaggtcatctcaggtattcaccgtgcagttcatccggatcttctggatcttgaatccggtctggcactgatcgcggttgtgggacgcggtatgagagatacgcgtggtgtggcaagtaaagtattcgatgcactggccaaggcgaatatcaatattaagatgatcgaccagggatccagtgagctgaatattattattggtgtgaaagagaagtatttcgaggatgcgatcaaagtcatctatgatgcttttatcaccaatgcagcaccggctaaatagtcatcacgcaatattggcataacatcagtctaaaaacatataaccatagtaggagttataattgacgcttattcgctgatatgttagaatgagtgagaaaagtccggtacgaagccggctgtgaattttagagagacgatatagaataaagataactgaacagttacatatcaaggccacgaaggcgtttgagcgtgaatacccatatgtgtgagatatggtttagctcggtacgttttcgtggctttcgttttgcatggggagggacaatatggacgttttaaagctactggaagatgtgaaaaatgataaggtttcactggaagaggcagctaaggaattaaagcagctgccttatgaggatctgggatttgccaagttggatcatcatcggcagattcgttccggattcggcgaggttgtattttgcagtggcaaatcggatgagcatttgctgaagatttatgagacattttataaaactgatacagaggtactcggtacgcgcgcttctgagcatcagtatgagctagtgaaagccgttataccggaagtgacttatgatccgctgtcaagaattttgaagattgagaagcctggaaaggaaagaattggccgtgtggctgtctgtacagccggtacggcagatattgcagttgctgaagaagcagcacaggtggcggaatattttggcaccaacgttgatagattttatgatgtgggtgttgcaggcattcatcgtttatttgccaaactggaagaaattcgcaaagccaactgtattattgctgttgccggtatggagggagcacttggcggtgttctggcgggccttgttgaggtaccggtgattgctgttccgacttctattggttatggtgcgaacttcggcggtctgtcagcacttttgacaatgctgaattcctgttccaatggcattactgttgtcaatattgataatggttacggtgccggctatatcagtacacagattaaccgtttggcagtcaaagcctataagccggaataagagagacggggatttggcggcaatatcatatagatgaagcagtgcctgcctgagaaattgattttgagcagtctattgtaatttaagtataaagataaggggatttgtaaaatgagcaagaaagttttatatctggaatgtttttcgggtatcagcggggatatgacggttggtgcattattagatcttggggcagacccggaagtattaaaacagtcattggattcactgcatgtggatggttatgaggtaaaaatcggaagaagcagcaagtgtggtattgatgcctgcgattttgatgtgctgataccagatcagccggaatatgatgaaggccatatgcatcaccatgatgatgatcacgatcacgaacatcatcaccacgatgatgaccacgaccacgaacatcaccaccatgatgatgaccacgaccacgaacatcaccaccatgatgatgaccacgatcacgaacatcatcaccacgatgatgaccacgaccacgaacatcatcaccatgatgatgaccacgatcacgaacatcatcaccacgatcatgaccatcatcatcatgatcacggccatggtcatcatcatgcgcatgtacatagaaatattcatgatgtattcgcagtgattgatagacttgagaatgagcatgttaagacattagcgaaaaaaatgtttatgattgttgcggaagcagagtctaaagcccatggcctgccgattgaagaagtgcatttccatgaagtaggtgccattgattctattgtagatattatcagtgtggctgtctgtgtggacaatctcggtgtggatgatattgtcgtttccgaattatatgagggatccggccatgtgcattgtcagcatggtatgatgcctgtgcctgtacctgcaactgccaatattgttgcggctaatcacctgccgatgaagattacggacgctcagggagaaatggtcacaccgacaggtgcagcgattgcagctgctcttcgtacgcaagatcatttgccagaggattatcagttgctgaagatcggccttggtgccggcaagaaggatttcccgaaggcaaatgttttgagagcaatgctgcttgagacaaaggatcagccacagacaggtgaggaagaagatatctggaaactggagagcaacattgatgactgttcaggcgaagttctcggctatacaatggagcgtcttttggctgcaggggcgagagatgtatgttatgcgccgatttacatgaagaagaatcgtccggcctatatgcttcatgtgctgtgcgaccgcagacagattcctgcaatggaagaaattatttttaatgagacgacaaccatcggtattcgcagatataaggttgagcgtacaattttaaaacgtcatgaagcaaaagccaaaacggcttatggcgaagtggaattaaaaatttgtgagaagaatggcatcgtttatcgttatcctgaatatgaaagtgttaaaaagctttgtgaggcagccggtgtaccgtttaaagttgtatatcaggcagcctgtgaagcagaaatcagtgaataaacagcatggaaagcgtgctgtaaatgaaataaaatgtcgaacagggcatcaggtatgagacacaagaagtgaggaatcagacatggaaatcagaacacgtttagtaaattatatgaaggaattgggggataaggatctgtgtgtggctttttcaggcggcgtggacagctcagttatcttaagggcagcctgtgaggcggcagcagctaatggtaaaaaggtgtacgcagtgacctttgaaacaaaactgcatccaaaggcagacttgccacaggctcagaaagtggccaaagaagcaggcgctattcatcatgttatctatgtcaatgagctggataatgaggagatgctcaacaatcctgtgaacagatgctatctctgcaaaaaatatttgttccagaatttgctgacatttgccgctgaaaaaggtatcgatacaatcatggaaggcaacaatgcagatgatcttcttatctatcgaccgggaacacaggcagttaaagagcttggggtattaagtccgctggcagagctggggattacaaaggcacaggtgcgtgaaattgcagcagatatgggactttcatgtgccagccgtccatcttctccttgtctggcaacacgactgccgtatggtacaccgatttcattcgaactgcttgcaagggtggatgctggtgaacagtggctgaaggagcagggattcccaattgtccgtctgcgtgttcacggtgatattctgcgtattgaaattgacaaagaacgtttttcggattttattgcaatggcagataagattacagcaaaaatgaaggaacttggtttcgtctatattacattggatgcggaaggttttcgctcaggcagcatggatgtacatattgtgaaatagacagaaaagaaataaagtaaaatgagccgttccgggactgaaacagaagaaacgatgcccggaacggtttttgtgtcaatgataaaaagccggaaaggaagcagttgattcttatgaaacacaggcaataatgtgctcatattcagatggtctgaaatgcacaataaaatgctgctgctgtttctgagaaagataatagcacggaatattttcaagaccaagcgctctggctttatgcagacggtgattgccgtcgatcagcagcaaatgatctttggaaagctcggcaaccaccagaggctttgtcagatcggaggccatggcccgggtgtgactgactctggcatcattatggtcagccagtaaagtggtggaaagtgtctggattgtataagaatcaggatgttgttcaatgtcttcaagaatagaagtgacatcccagatgagaataccgttgtctgttgcaaaatgatatttctgtcgcataaattaaaccctctgtaaatggaaaaagttggtaacaacgaaaaaaggcaacgtgcgatagacgccgttgccttttactgctctatcatagcataatatttttaaaatgtatatcccctaatttaaaaagattgatttatgggtgcagatatagtatgataatcagagaattttatgaaaaagaatttaggaggcgtaatgtgaaccggtttattaacgatacgaaaaagtactggaaatataccttatacgctgcaaagtcacagttgaagacagaggtagccaattcctacctgaactggatctggtgggtgcttgagccattctgttttatgttgatttatgcatttattttcgggtatatgctggggcataaggaattatattacaatgtttatatatttgtgggtcttgccatctgggatttcttcaacagatgtatcaagagttctgtcagaatggtgaagcgcaacaagtccattgtgtcgaaagtgtatttgccgaagcacacattgattatgtctgatatgatggtgaacgcattcaagatgctgatctgctttggcctttcagccggcatgattatttactatagagtaccgattggctggcaggcactctatgcgattcccgcattgatcacgatgatcatatttacgttcggatgctgctgtatattgcttcatctgggagtttttattgatgatatggctaatgtgattaatattgtgctgcgttttgtgttttatttgacaggtattttctataatattaatatttttccggagccaatttatagtctggtactgaagggaaatccgctggcatttatgatttcaagtttcagagattctatcctgtatcagacagtaccttcgagaaaatggttgttattctggtttgtcatttcagtggcactggctgcatttggtgtgcggaacatttataagaatgagaatacgtatgtaaaggtaatataatatggaagaatatgcaattacagtcaaagatttaaagattcgttataaaagtgtacaggcctattcaatcaaaaagagtctgcttcggttgaaaggtgtggaggcgaaagcctttgaagccgtgcgcggcatcagttttgaagttaagcagggcgaaatccttggtattacaggcaagaatggaagcggcaaatcaacactgcttcgcgcattggcacatatcttttctgcggatgaaggtagtattgatctgcatggccattctgtttcactgctggccattggtgttggattcaagaatgagatgacaggacgtgagaatatcatgctgtcaggtatgctgcttggattcagcgagaaagaagtacaggaacgtatggatgacatcatcgaatttgccggattgggtgaatttattgatatgccggtgcgtacttattcaagcggtatgtattccaagctcgcattttctattacggccattcttgaaacagatatcatgctgattgatgaggtgctcagtgtaggtgatgagaagttcaagaagaagagctatgagaagatgaaatcactgatctcacagcgcaaccggacggttgttattgtgtcacatagtcttaagactttggaagaattgtgtgaccgtgttatgtggatgcatgaaggcaagattgtgaagatcggtgaaccggttgaagtattgaatgagtatcgggagttcatgaaatagaaggtgacagaattgaaaacaatagttgagttgtacaatgatgataatcgcagaccggaagttatggaaagggcaggagaaatcctgaaaaagggcggacttgtagcttttccgacagaaacggtgtacggactgggtggagatgctctgaatcctgaagcgtcggccagaatttatgcggcaaagggacggccatcggataatccgctgatcgtgcatatcgcagatatggaagcgcttaaagtactggcatcggaagttcctgagaaagccagactgctggcggatcgtttttggccgggaccattgaccatgattatgcctaaatcagatgcggtgccttatgcaacaacaggcggtctggatacagttgctattcgtatgccatcgcatccgacagcttatgaattgatcagaagctccggtgtgtatattgcggcaccgagtgccaacacatcaggcaggccaagtccgacaactgcacagcatgtctatgaggatttgaatggacgtattgatatgattatcgacagcggcaaagtggatatcggattggaatctaccattgtggatctgaccggagagataccaacgattctgcgcccgggctatataacgaaggaaatgctggaagaggctgtgggccctgtgaccattgacaaggcaattcttgcagatcatgaggatccgaatcttcgtccaaaggcgccgggaatgaaatataagcattatgcaccgaagggcgatctggttattgtggaaggaaagaagcaggcagtggccgagacaatcaatcatttaacaaagatggatgcagaagccggattaaaaacagcagttattgcttctgatgagaatttatctctttatgatgcggactgcaagatcaatatcgggtccagagaacatgaggaaagcattgcggctaatctgtatgaagtccttcgtgaaatggatgagatgggggttcagaagatgtattcggagagttttgccggcggcggacttggcgcggccattatgaatcgcctgctgaaagcggccggacatcatgtgatccgcgtataatatttatggtactcagccggatacccggaggcatggacaaagggtatccggacaatatatataacaaaggagaatgagaaaatgatagcacttggatgtgatcatggtggttatgaactgatgcaggaagtgataaaatatctggaggagcacggcctggaatataagaattacggtacttattccacagattcctgtgactatccggattatgccaaaaaggtagcagaagcaattcttgcaggtgaatgtgaaaaaggtattctgatctgcggtacaggcattggtattacaattgcagccaaccgttatgagggaatcagagcggccaactgtacaaacagctttatggcggaagctacaagagagcataatgatgccaatattcttggtatgggagcacgtgtcattggtgtgggcactgcattgaagattgtggatacattcctgaatacaccattttccaatgatgaaagacataagagaagaattgcaaagattgaacattaaagcatcaaatcatccgccgggcaggcggcagtgcctgcctttaacgggtgatttttgctgtttatgtgaataatgaacaaaaggaggataaagatgtcagaaaagaggcaagattatatcagctgggatgagtattttatgggggtagcaaagcttgcagggctaagatctaaggatccgaacagtcaggttggttcctgcattgtcagcccggataataagatcctgtccattggttataatggttttccgagggggtgttcggacgatgtattcccctggagccgagaaggcgatgagttggataccaagtatttttatgttactcacagcgaattgaatgctattttgaattaccgcggaggcagcctggaaggaagcaaaatttatgtgtcattgtttccgtgcaacgaatgctccaaggcgattatccaaagcggaattcgagagattatctatgattcggataaatatggtgacacaccggctgttatagcatcgcgaaaaatgctggatgcagcgggtgttcattatcgccgttatattcggagtggacgggaactgaagataacagtataaaaaacaataaacaagcgttgagcagtttgtatgaattgtttgtgtgcaaactgttcaatatatacattgaatagatacagaattatgtatacagtagacatgttaaatagtaaatatgacgctatgcaaaagaattatagacatatttattaaaatttgctaaaataattattgagcgaattttgaaacagatagagcaatcataaaagggagagagaggatgagagataagcatggtataggacaggcgattgtgatgatcacacagctcagcatcaatatgcttgtacctgtttttatgtgtctgttcattggtatctggctggataagcgcttgggtacaggatggctgacacttgtttttctgattcttggtattatggcatctattcgttcaatgttcatcacgttaaagccattgttgaagggagaaagagagaagaaggatgaagcatttaaaaagcaactggatgagcaatttaaagactcagaatgaagcgcttgcggatctgattcttggtatcctgatatttggcatactggtagtatttgtgggactgtttgtggccccggataaagcagcctttgtgttgggtgcagtacttggtacagcgacttccgtaattcgagccgtgcatatggcggtgacacttgatcggcagctggattacggtgagaaggatgcaagagcttatgcggcacgtaattatggtattcgttatttgattatgatcgcagtgcttcttgtttcaaccagactgggtgtttccggcatggcgggagctgtcatcggattgttttcgatgaagccggctgcgattctgagtcctcagattcacaagtatatttataccagaatttttggcaaaggaaggtgaagttatgggcaatgaagtcgactttatggtacatggatatgttcctctgaacattttcggccatgaagtctggttgacgacaacacatgtctgcctgctgattgtctgcctttttatgctggtcatagggctgattgtcaacaacaagatgaagcacgcaacagaggtgccgggaatggtacagaacattgcggagctttatgtggaaatgatggacggcgtggtccagtcaagtatgttcaggcattggggcaaatatgccaactatatcctgacaattttcatgttccttctgttttccaacatttcgggtcttttcggactcagaccgccaactgctgattacggtgtgacattgccgctggcattgatcacatttgttttgattcagtttaatgcattcaagtggaagggtgttggaggctatgtgaaggatctgatggatccaatcccattattcctgccaatcaatattatcagcgaatttgcaacgccggtttcactgtcgctgcgtctgtttggtaatgtcatggccggaaccattatgctggcattgtattacggcatgctgcctgtgctggtaacagtagtgattccgtcattcttacatgcatatcttgacttattctccggagcgatccaggcatatgtcttctgtatgttgtcaatgacatttatctaccagaaaatgccggaataaaatatccggacaatcaaaatttatatttttttaaggaggaaatataatgaatggtataacaaatgaaggtttagtattagcgtgttcagcaattggcgccggcctcgctgttattgccggtatcggacctggtgtaggccagggtattgcagccggtcatggtgcatctgcagttggacgtaacccgggtgctaagggtgatatcatgcagacaatgcttcttggtcaggccgttgccgagacaacaggtctttatggtctggttatcgctctgatcctgctctttgccaacccattatttggcaaactgtaagatcagacaatattgtttaagcaacaatataaaacagagatattctgaaaggaggcttaaacttggaggacagattgtttgggcttgacgtgcagctcctgttcgatgcgtttgtactgtttgttgtgattatgatcatgtacgccatcatgagcaggctcttctttaagccggtgcgtgcattccttgaacagagaaagcaggcagtggcagcagacagagatgaagcacagcagcttcaggaagcagctgaggtatcaaaggcggcttatgaagaaaagctgaaggctgtacacaaagaagccgaagagattctatccgcatccagaaaagctgcaatgaagcagcaggatgccattattgaccaggcgaagtcagaagcctctgcaatcatggaacaggcagacagagaaacagtatctgaaaaacagcgtatcaaagcggatgtgagaaaagagatgtgtggactggcacttgcaatgacaggacggtttgcagatcaggctgatccacagcgtggagaagttcttcttgaggaagcgctgaaggaaatgggtggtgaagcatggttgaattaattgttacagcgatcaatgtgttcatcctgtttttcctgataggataccttgtctcggatatgctgtccggaatgctgaccaagcgtcaggaacggattgctgatgacatcaacacagcccgtatgagtaaagaagaagcactggctcttaagaatgattatgagcacagactggctgattttgaaagtgaaagggctgatattcttgagaatacacgcaggaaagctgcacagatggaagagagaattctgctggatggacagcaggaggctgacagagtgattgcccgtgcgaagagagaagctgagttgaagaagacgaagcttaaggaagatgtcagacatgatatgatcatggctgcatctatcacagcatgcaagctggcagcagaaactcttgatgacaagaagcaggcggtatatattcaggaaatgctggatgagatgggtgaatcaacatggcagaattaattgataagacatatggagaggcattgtttcagctgagtcttgaagaaggcaaggtagaacagtatgccgatgaagtaagaagcatcaaagaagccattgctgagaaccctgaattcatggttttactggaccatcctcagattacgagggaagagaaagtggaagttatgagaaactgtctggatggcagagcctctgacagtgtgaccggcttctttgttaccgttattcaggcgggaagacagcattttcttatgggaatgattgattattttctggatgctgtcagaaagtatcagcatattggcatagcagatgtgaccagtgcctgtgcattgagtgatgcgcagaaggcggccgttgaaaaacggcttttggagacaacgggtgatgtctccattgagattaattatcaggtagatcctgagatcattggaggattggttatccggatcggtgacaaggttgccgataatagtatccggacccagatcaatactctgacgaaggctatattaaacagctagaaagaaggtgccaaaagctccatgaatttaagacctgaagaaattagttcagttattaaagaacagattaagagatataaatcagaacttgaagtatcagatattggtacagttgttcaggtagcggatggtattgcgcgtattcacggacttgagaatgcgatgcagggcgaacttcttgaattcccgggtgacgtttatggtatggtcatgaacctggaggaagataatgttggtgccgttttgctcggcagtaacagaaatatcaatgagggagacgttgttaagacaacaggacgagtagttgaggtaccggttggtgacgcaatgcttggacgtgttgtcaatgctcttggtcagccaattgatggcaaaggccctattgataccaatgctttccgacagattgagagagtagcccatggcgttatcgagagaaagaaagtcgatacaccgttacagacaggaattaaggcgattgacgccatgatcccgattggccgtggtcagcgtgagctgattatcggtgacagacagactggtaagacagccattgcccttgatacgattatcaatcagaaaggacaggatgtcctttgtatctatgttgcaattggtcagaaacagtcgacagtatcttctattgtacacacactggaatccttcggagccatggattatacagttgttgttgcagcaacagcatccgaacttgcaccattgcagtatatcgcgccatatgcgggctgtgcgatcggtgaagagtggatggagcagggcaaggatgtcctcattgtttatgatgacttgacaaagcatgctgctgcttatcgtacactttccttgcttctccgcagaccaccagggcgtgaagcatacccaggtgacgttttctacttgcattcaagacttctggaacgtgcttccagactgtccgatgatctgggcggcggttcattgactgcacttccgatcattgaaacacaggcaggcgacgtatctgcgtatattccgacgaacgttatctccatcacagacggacagatctaccttgaaacagaaatgttcaactcaggtttcagaccagcgatcaatgccggactttctgtcagccgagttggtggtgatgcgcagatcaaggcaatgaagaagattgccggtcctatccgtacagagcttgctcagttcagagaactgcagtccttcgcacagttcggttccgatctggatgcggatacactgcagaacctggcacagggtgaacgtatccagcagatactgaaacagcctcagtatcagccaatgccggttgagaagcaggttgttatgatttatgccgttacaagaagacatctgacagatattcctgtagatcaggtacttgactttgaaaagggtctgcttgaatatatggacagcaaatgcgatgatgttctggcagctatccgtacagaaaaggtactgacagaagatatcgaagcaggtcttgtaaaggcaatcacagagtacaagaaggtatttctggaagaaaataagaggtgataaagcatggcctcaatgagagaaattaaacgacgcaaaaccagtattcagagtacggctcagattacaaaagccatgaaactggtttctacggttaagtttcagaaggcgaaagtcaaagctgaaaccacccgtccgtattttgacaagatgtatgagacagtgtcttctatcctgtcaagatcaggcaatattcaccatcgttatctgatgcagggtgaatctcagaaaaaggcagttattgtcattacgtccaatcgcggccttgccggcggctacaacagtaatgttgaaaaggctgttaccagtgtcggttttaatcctgcagatgtgcagctttacacagtaggtagtaaaggacgtgacaatctctccaaaaaaggttatgccgtagcaaaggattacggcgatgtcattgaagcaccaacgtatcgtgcagcaatggatatcggccgtgatgtgctgaatgccttttcgtccggtgaagtgggtgaaatctggatggcctatacggtcttcaagaatacgatcactcatattccgaagatgatccgtcttctgcctgtagctgttcctgaagaggaaacagccgaagagaagaaagacggaccactgcttctgatgaattttgagccggaaccggaagaagtactggatgcagtcattccgaagtatatcaatagtgttatttacggtggtatgatggatgccgttgcctctgagaacggtgcccgtatgacagccatggataatgcaacaagcaatgcagaggatatgattgagaatctgacattaagctataacagagcaagacagggtgcgattacacaggaaattaccgaaatcgtatccggtgcagaagcgcttaaataaacagaagggagtgatagcagcatatggcagagcatagtattggcaaaatcactcagattatcggtgcggtactggatatcaagtttgccgacggaaatcttcctgagataaacgatgccatccgcattaccagaaaagacggctcaacacttgttgttgaagttgctcagcatctgggtgatgatactgtccgctgtatttccatgggacctactgatggtcttgtgcgtggtatggaggctatcgctacaggcggccctattacggtgcctgtaggtgaaaagacactgggacgtattttcaacgttctcggtgaagcaattgataataaagaagctccacaggctgaagaacacctgccgattcatagaaaaccacctgcttttgaagatctgtctgatgagcaggaaatccttgaaacaggtatcaaagtcgttgacttactttgcccttatcagaagggtggtaagatcggtctgttcggtggtgccggtgtagggaagaccgtcctgatccaggagctgatccgtaatatcgcaacagagcacggcggctactctgtattcacaggtgtaggcgagcgtacccgtgaaggtaatgacctttacacagaaatgtctgaatccggtgttatcaacaagacaaccatggtattcggacagatgaatgagccacctggctcaagaatgcgtgtcggtctgacaggactgacaatggcagaacatttccgtgataccggcaaagacgtgctgcttttcattgacaatattttccgttttacacaggctggttcagaggtatctgctctgttgggccgtgtacctagtgccgttggttatcagccgacactgcagacggaaatgggtgcgcttcaggagcgtatcacatctacaaagacaggttccattacatccgtacaggctgtatatgtacctgccgatgacttaacagaccctgctccggcaacgacattcacccatctggatgcaacgacggtactttcacgttccatcgttgagctgggtatttatccggccgttgatccgctggaatccacatcacgtatgttggatccgcatattgttggtgaagaacattaccgtgttgccagaagcgtacaggagattcttcagcgttataaagaattacaggatattatcgctattcttggtatggatgaactttcagaagaagataagctggttgtatccagagcacgtaaggttcagagattcctgtcccagcctttcttcgtaggcgaacagtttacaggtctgaaaggacgttatgtaccgctgtctgagacaatccagggcttcaaggaaatcattgcaggtaaatacgatgatattcctgaaagctatttcctgatggcaggtaatattgatgacgttcttgccaaagtgaaataagtctggaggatgagatatggaagccttgatgcagctgcagatcattacaccggatcgtctgatgtgtgatgaatctgtcaaaatggttgaaatgagaactgcggaaggcgagattggcgtccttccgggacatattccggtgactgtcatgatggcgccgggagttactcatatcacaaaggctgacggaagtatccgacatattgcgattcatgatggttttgtagaaatacagccagacaagatcagcatcatggcggaaattgccgaatggccagaagaagtcgatctggatagagcaaaagctgcgctttcccgtgcgagagagcgtatcactaatccaggtccggatacggatattgcccgcgcaagacgtgcatgggcccgtgccgcagctcgaattgaattacttaccagagagtggtaaaaaaagtccccgtatatcggaaatggtatgcggggatttattattgtgtacattaatatttgccagaagaaaaagatttctggattcctttaaccggaaaagcaaaaattctagtgcttaggagaagggttaaaagaatgctgatcagcagccagattattttacccggtgcggagtcggacagaagtttatcggcgtgtattccggttaagaaatagataaacggataatgccagaaaaagacttgaagtgtacggctaccggcctttgtgataaatggcagctttttattaggaaaaatgcacataagacaaaagcctgcgataatagttatcgccatgcataatgccctgtaaataggaccataaaaggcaaatatttcattagatgcgaaagaatgcttgccggtgaaaagtgtcagtaaaaaactaagatgaccagtttgagtcatgcacaagatgccccagccaataatacagatagcaccaataattttgagaacgggacgttgtgtgatagacagcaccttttctttattggtcatttgaccaagcaaataaaatgggtagaatacgataaatctggataaataaagataatcacctaaagatttatcatagccggaaaaacaagccagaagtgtgaataaaataaataaattagaggtattaaaatcgcgtagaaagtaggaagttgctgtaaacatagccatagcgaacataaaccaaggaacaccaggatcagctagaagcgaaaaaaaagctttatgaagaaatacaatcctgcataatgcaaagagtattttcatagagaaaccaattgcgataaatgaaacgcaacgattttttatattatggttgctgtgaaataatcctgctaaataaatgaaaaatggcatatgaaaagaatagataaataaaaacaatccgctcatcatatgagaagacttagttatataagcaataaaatgcccaatgacaacggtgagaatcagaaaaaattttaaattatcaaataaaaaaatacgtttttccatgcttatcatgttaactcctttatgaaatagacagttcatctgtcttattaattttagcataatgattcgattgaaacaagggatacaaaatgtgtcaaaaagcttacgattttattgcttttgtgaaaacttgcgttatagtatcgttattaattggaaaatatgatatacttcatagtattgagacaataagtaaatggattagagggcaatataagaatcatggtattttttataaaacaggttatcaagatggcctttcagcaagtcatcctgccgatcgtatataagttatatgcggtaaaaccaattaaacagggaacaatacttttggctgatgcacatcatgatgagataccgtttagtttgatggcattgaaggcagcactggagcagcaggaagatttgcatataacagagatgtattggaataatgagcattgttcggcaggccgggtacttcggaatatgtttgaattcatgaagttatacgctgtttcacagacggttgtgatctgtgacaactttttgccggcagcatcatgccgtaagcgtaaaggaacaaaggttatacagctgtggcatgccggtggtgcgctgaagaagtttggttatgacacggcggacgatattccggcctattataaaggtaatgttatggcaaattgcaacctggtcacagtgagtgcaaagcgatgtattgaaccattttccagcgccatgcggctgccgtgtcaaagagtcaaagcaatgggcatcagccgaacagatctttattttgatgagaatttcaacagagaatgtcgggaacatttctttgaagaatatccggaagcaaaaggcaagaaaattgtattgtgggcgccgacattcaggggaaatccgggagtggccggtgtcaaaggactgaaaggaattcagagaatcagtgaaagactgaaagcaacacattattttattattaagctgcatccgcatacgcaggttcatctggcaggaagtaactgtgagattctgacggaagaattattaccggcggcagatgtcttgatcacagactactcgtcaattctctttgatgcgatgatctacaagcttcctattgttctgtttgtaccggatttggaagaatatgtggacaacaggggattttacctggattacagggagataccgggaattcgagcgcggaatgaacgggaattaatagagatatttaccgatccatctatgctgaatgcttcggttaatgaagcctatatgactttttatagaaaatatatggctgcctgcgacggtcatgcaacagaacgaattatcagatatatcaagagatatatgtaatggaataacaggaggaattattcaatggcaaataatatttatggcgttattcttgccggaggcaagggaacaagaatgggtaatgtagagagaccaaaacagtttatggaggttggcgggaagccgattatcgtgcataccattgagaaatttgcaattcatacagaatttgataaaattattatcctttcaccaaaggcctggatctctcataccaatgatctgattaagaaatatatcccaatgagagataagttggttgttgttcaaggcggttcgacgagaaatgagacaatcatgaacggcattcgttatattgaagagaactttggtctggatgaggatacaattattgtgacacatgattcagttcgcccgtttgttacccatagaatgattgaggagaatatccaggcggctatggcatgcggtgcttgcgatacggttattcctgcaacggatacaattgtagagagcaaagatcatcagaatatcagttgtattccagagagatcaaccatgtatctgggacagacccctcagtcatttaaggcaaagaaactgcgggatatatacctgaatatgacagaagaagaaaaggaaattctgacagatgcctgcaagatcatggtgctcaaaggcgagcaggttcgtcttgtggaaggtgatgtgacaaatatcaagatcacatatccttcagatatccgtatggcagaatctttgttaggaggaaaatagggtgttaaatacagtttatcagttagtcagacctcgccagtttgaagttgtttttaaagatattaccatggatgacaaacatgtgattgttcatccaacccatttatctatctgcaatgcagatcagcgttattatcagggacttcgtgcggaagctgttctaaagaaaaagctgccgatggctttgatccatgaaggcatcggccgggtaatctatgacccgacaggccattttgaacagggaacactggtagtcatgattccaaatacaccggtagagcaggacgagatcatcgctgagaattatctgcgcagcagtaagttcagagccagtggctttgacggttttatgcaggaatatgtgagcatggaaccggatcggctggttgttttgccggaagatatcaacctttcagttgcggcgtttacagagattgtcagtgtcagctatcatgctatccagagatttcttcgcttttctcatgaaagaagaaatgtcattggtgtatggggcgatggtaatctgggttatattacctctttattattgaagaaacttttaccggatacaaaggtttgcgtatttggggttaatgagtataaactgaacgatttctcctttgtggatgatacttaccttgtcacggatataccggaagatcttcatttggatcatgcctttgagtgtgtcggtggggcagctgcatctaaggcgattaatcagatcattgattatatcaatccggaaggtacaatctctattatgggtgtttctgaggatcttgcaccgattaatacacgaatggtccttgagaagggactgcggattttcggcagcagccgaagcggacgtgcagatttccaggggttgatcaatttgtacaaggaacatccggaggttgtcaatcatctggaaaagattgtgggtgcagagatcaaagtcagaagtattgcagatatgacaaaggcatttgaatcggatattcataagattatgggtaaaaccgttatgatatgggataattagcaatgaagaaggtattgaagaagatttatgatattttgcccaatggcataaaaaaactttactggcagaccaggaaaaaggtcggtcagatactgatgtttcgtattgtatttccgttgggatacaaacactacattaaagggaagaagataaaaaggaaaaaagcagtttttgtggaagttcgttttgatgagattacagacagtttccggcttgtctatgatcgcatgaaagcggatggttttgatgttcatgagcagtttattgagaatattaaaccgggaaagtggggatatattaagcggtgtctgagaatgcttgaagacatttccgatgctcattatgtatttctgaatgacgcatgcaatgtgaccagttgtattccgctgcgcaaaggaacaaaaatttatcagttgtggcatgcctgcggtgcatttaagaaattcggcatgagtacggcagagcttatttttggtgacaacagaaagacgttggagaaatatccaaattacggcaatctgtcttacgtgacagtcagcagtccggaagtgatctgggcttatgaggaggccatgaatctgaaggacacaaagacacaggttgtggcaacaggtgtcagccgtacggatgttttttatgatcagcattttattgaacagtctaaagcggctgtctattcggtatgcccggctgcggagaataagaagatcattctttatgcaccgacattcagaggccgggtagctaaggctgagagcccagattgtttggatattcctgcaatgaagcgtgcattgggagatgaatatgtattattgatcaagcatcatccgtttgtcaaacagccgccggttgtaccggaggattgtgcggattttgccatggatgtgacaaagagcctggagattgatcagctattatgcgtcagtgatgtatgcatttcagactactcatcgttgatttttgaatattcattatttgaaaggccgatgattttctttgcgtacgatttggatgattattttgactggcgcggcttttattataattatgatgaattgacaccggggccggttgtgaaagagacagaagaaatcattgactatatcagacatttggatgcacgatttgatcaggctcaggttcatgcttttaaagaaaaatttatgtcatcatgtgatggccatgcaacagatcgaattatggcgttagtatatgcagaaacaaggaataaaaggaagtgaaagtatagatggtagaaacagaagtaaagagaaataaaaagatttgggtttttaatgcaggagatgctttttcaggaaatcctaaatggctttttttatatatcgttaatcacaggaaagatattaccccgtattggctttgctataaagaaaatatggtttcatatatgaaagaaaggggatacaaagcgtatctttttaactcatcggaagggaaagtaattgaacgtcaggctgggatatatgttgttaatcaggtaaaggaagttattcaggatgaattaaagggtgtaacaatattaaatctttggcatggtgtaggttgtaagtccattgagcgaaaggttaattttggttttttaaatgaacgaattgccaagaaatatattaaaaataactactactataaaaattatcaattgtttctggtaacgtcaccattgatggaaaatcatttcaaagagcaatgcggtatagatgatgataaggttatcagggcggggtatccgtgctgtattcacaatgaagcggcaaatagttttgaccacgatgttttaaaacggcagggacttccggagaacacgaaaattgttgtttatagtccgacttacagagatgcttcggctacagaattttttggaaaagcaattcaggacctggatcgacttgttgaggttttagaaaagaatggaatgcttcttatttttaagatgcatccgcagatgatgaaagaccgaaaatacaatgaggctatggaaagatataaagagtgcaatagattgatgttttgggataatcaggatgatatttatgaggtctttgaccagatagatattgcaattattgattattcatcaatcttttatgatatgctggcgggtggtgttaagcattttatcagatatatgtttgatattgatgataaaaataatttgcgagatttcgtgtttgatgtgaaagaaatgacctgtggttatgattgtaataattttgatgaattacttgatgcattagaccatagtgatgcttgtttgcaggaagatgaaacccgtaagcgggagatttatgatcttttttgggagtatgcaaaatcagctggaaatgaagagattgttgaagcagcattgaattttgaaccaaatcctgttgatttgccaactgtgtacagctttgatatttttgatacactgattaagagaaaagctctgaaaccggccagtgtgttctattatgttcaggatatgctggcacaggatgaaatcagatttccgaatttgctgttaaatgattatgcaagaatacgaatgcaatgtgaggcaaatgtgcgtgaatggtataagaaaactctgtttaagcgtgagggagatcgcctggaaattactcttgatgaaatttacgagcgaatgcagaacgtatatttactatcagatgaacagattgcaagaatgaaagaactggagcagcagactgaaatcgaacagtgtattccatatcctgagcatatagatgtattaaaacaacatttggcaaatggagaaaaggttcttttgattagtgatatgtatttgccaaaagaaacaattataaagatgcttgagaaagcggatcctattttgacgactgtaccactgtatttgtcaagtgagtatggtgtgcaaaagacaactaaaaagttatttcttgaagcttataaggatatggattatatttatggtgagtggattcattatggggatagtccggttgcagattgtaagaaaccatcagaattgggaataacaacgattaatcacacagtacctgatttgaatgaatatgaacaattattggtggagcagcttcagtcttacgatgcttatttggcggcagctgctatggcgcgatatagagaggaatataaagatgaaatagaggatgaagagggatctaaaatctttgcctatgcctatgcttcactttattttgttccatatattaactgggccattaaagatgctgttcgcagaggaacagaatgcctatactttatatcaagagatggttaccatttaaaaagaattgcagatgcactcattgaggttaaagggtatccgattaagacaaaatatatttatggctcaagaaaggcatggcgcataccttcttttgtcaatgaaattgacgatgagtttttctcagaatttggcaattttgcgaatattaaaaagtatgacagtttgttaaaggcaatggatattacagaagaggactttataagaatttttccagaattggagtatttgaaatcttcaggaagaatatccaaaggattgctcaaacagttaagattgaagttttctgaatcagatgagtatagacattatattattgagaaagcggcggaagaacgaaaactggttaaagcatatcttcagcaggagattaattttaatgaatcctttgcctttgtggaatattggggacgagggtatactcaagattgcctgacaagacttttagatgatgcagcagggcatgaagtaccggatccatgttattatgcaagaagcatttatggaacggacggacgttctatcagatataactatacaacgaataccggatcactaatttttatagaggccttgtttgccaatttggattacagaagtgttccgggatatgtagaaaaaaatggacgaattgagccaattatcttgccttgtgataatgatatggttatgcagaaggcatttgaagaaaattttgtccgttttgcaaaagacttttatggacagccgcttcaagatgaagatcggtttgaacgtgaaatctttaattttgcaatggattactatcgggattatgctgatacaccgattatggtaaagaacatagctcatttaaaggattctgtagaacaatatggagctgccgctgaatttgcacctcagattacttttggtagagttgtgggaagattctttaaaaaggattatttttatacgaaatcaagaaaaatgtctttggcaagatcaaatccaatttaccagaaagggtatatatggtataaggatacgtttaaaaagactaatacatttaaaaatataagaaaactgatgaaaaaaaggaagtaaataaaatgaaaaaaatatcagtggtcgtgtccgtatataatgaggaattatcgctgaataaattctaccaggtaactgaaaagattcttgaaagttgtgcttgggattatgaaatgatttttgtcaatgatgggagtgttgacaggagtatagaaattttaaaagaatttgcagaaataaattcaaaggtgaaagttgttaatttttcacgtaattttggacatgaagcagctatgattgccggtattgattattcgactggggatggcattgtatgtatggatgctgatttacagcatcctccacagtgcattccagatattatccaaaagtttgaggatgggtatgaggttgtttctatgatacgaactcaaaatgaggatgcaggttttattaagagatttacgtcagctgcattttataaggtgttgaatatgttgtcacctgtcaaattcgaagataattcatctgatttttttgctttgagcaattctgttgcagaagtactgagaaatgattatcgagaaaagattcgctatttaaggggatatgttcaaagtgttggatttgagaagacgacacttgaattttcagcaggtaaaagaactgctggtgaaagtaaatacaatataaaaaaattgattaagttttccattaatgccttatgtagcttttctgatttaccattgaagctgggaatatattcaggctgtggggttgctttcttaggttttattctgatggtttatacaattatcaataaatttattaatcatgtaccggcaggctattcaacaattatagtcgttttatgttttatgtttgctgtgacattaatagtgattgggattattggggaatatattgcgatattgtttgccgaggtaaaagaccgtcctatttatattgtacgagaagttataaatgataataaagataattaaagaaggagggaaagaagcaatggtgaaaaaagaattaaaaaaattcgtggtattgttgctggtattgggaatgatgttgtctggaactcagacagtgtgggctacagaggtgactaattcaaatgagaataataaaactccagtagttgcagcaaagatagaaacagagacagaaacagagacagaaacagagacagagacagagacagaaacagagacagaaacagagacagaaacagagacagagacagaaacagaaacagagacagaaacagagacagaaacagggacagaaacagagacagaaacagagacagaaacagaaacagagacagaaacagaacaaaaaaatggctggttcgaaaatgaaaaaggtgaaaaaagctattatattgatgataagccagttgtaggaagaaaaacaattaaggctgaggatggtaaggcatacgagtattattttgataaaaatggcgttatgcaaactggtcttcagaaaattgaagacaataatggcgagacacaggtatattgctatgatgttgatggtaaaaagatttttggtgaatataaatgcattctaaatgataaaaagtggcattactttgatgtgaaaacaggtattatggtaaccggctttgcgacaatcccagtaaaaagtggtgaaacaaaacgagtctattatgataatagtggagcaatggtnnnnnnnnnngtcaggtaagatggtaaccggctttgcgacaatcccagtaaaaagtggtggaacaaaacgagtctattatgataatagtggagcaatggtgtatggggagtataagtgcaatgataataaatggcattactttaatacagcatcaggtaagatggtaacaggttttgcaacaataccggtaaagcgtggcggtaagaagaaagtctattatgataataacggagcaatggtgtatggggagtataagtgcaatgataataaatggcattactttaatacagcatcaggtaagatggtaacaggttttgcaacaataccggtaaagagtggcggcaagaagaaagtttattacgataataatggagcgatggtgtatggagagtataagtgcaatgataataaatggcattactttaatacagcgtcaggtaagatggtaacaggtttcgcaacaataccgataaagagcggcggcaagaagaaagtttattacgataataatggagcgatggtatatgggtgggtaagtactggtggaactaattattattgtgatttaaagtctggtgcgctcaagtatacgtttaaaaaacaaaatggatattatttggcatataataatcgcggtgaattagtaaaagatttacgttctgattttggtaatcagtctagttatgtaataaaagtcaatacatcaaccaatacgattactgtttatgctaaatttaaagacggtacatatacaatgccattggttgcatttatttgttcctgtggtgcacctagtacaccgactccgctgggaacatattatacatctgatagatggagatggttaagaatgatgggaccaagttgggggcaatgggtaactcagataaaaggagattatttattccattctgtatattataattcaaaaaataataataataatttgagtgtaaaggcatacaataaattgggaacagcgtgctcacatggctgtgtgcgtcttaaagcaggagatgcaaaatggatttatgataattgtaaattacagacgaaaatagtaatttataaaggcgcatcatctacagatccattgggtaaaccaactgcgtacaaattatcgtctagtcatacatgggatccgacagaccctaatatggcttataaatgtaaacaacatgggtgtcattagttgttttatgcgagactggttgtaaggccggtctcgcttacgttattctataaggagcagtactataaatgatagagaaaactataaaaaaaaataatgtttctacacaaagatactatagtatatatacggtgctgtttgctatattggctatcctggtatacagttattatattataaacggcaaatcttttgtatattgtgatgtaaatcagggaggcgatggtttagttcagcattttaacgcttttgtgtattatggtaaatatttacgcggaatagtaaaaaatctgttgtttgagcatcaacttgaaatacctatgtgggatttaagtattggttatgggcaggatataatttcaacattaagttattatgttattggagatccgttcgcttttctttcaatttttttccctgtagctaaagcagaatatggatattcttttttgattctcctgagaatatattttgcaggtatagctttttcggtttattgtcgttatagaaaaaaggattccttgtatacattagtaggagcctttatttatgcattttcatattatacgttgtgtattgcagttctgcacccatattttatgttgccggcagtttatttgccattgttgttgatgggagcagacaaggtactgcgtaaagaaggagattgcttttttatagcaatggttgctcttgcaggaatttcaaatttttactttttctttatgttgtgtattatggtggtcatttatgttgtatttaactattttaatttgttcgggaaaattcgaataagggaatttggttattggtttgttcgattttttatagatgcgattttaggcgttggtatggcagctgtgttattacttccatcaattattaatattttatcttcgtcaagaatatcggtgaaaaattatattccagtaatttatgaattgaaatattatttaaatctgatgccatcttttgttagtggtggtggtgattattatgtacatatgggatatacagcactgagttttatagcagtgcttatactttttatgcaccgcaaagaaaagaaagaatataagtatttatgtgcagggttccttttattagtattatttttaatatttccgttttttggacacttatttaatgggctttcttatgttacgaatcgatggatatgggcactggctttttgcgtttcttatattacagtgacagttttgccgttgatgggaagaataaatcgcaaagaatggctgattttgttttgtgcggcaattattatgggtggctttgttatagggctagatgtggttcggacaaagaagaacatgtgggctgtttatggaataattgctgtgttggtgattttgtatggaatggcatactgtggcaaacaaaagtttttagcagatacatgtgtggcaattgtaatggtatctgtaagtataaatgcactttatttgtattcaccgacagaaggcaattatttggaaaatttttccaacagaggaggggcgtatcgtcaattaacccaaaaggcaccagaatatttactgaaggagttaaatgatacagaattatatagatttgatacattaggctttgacactgggaaaattaagagaaattcagcgatgcagttaaatatgtatggtactgcatattattttagtgctacgaacggaacaatttcgaagtttatatcagatttgtatattaatacacctttggaaaatagttataataatttaaatggacgcagttggctggatgccataactgctgttaaatattttattataccaaaagagaaacagaatttattgtcatatggatataatcataaagttatagaaaataaagaaaatgcagtttatacatctaaaaatagtctgccatttggttttacgtcttccgtgattatgagtcaggatgagtttgaaaaaatggatgttttggagaagcagcaggcactgctacaggggattgttcttgatggggataatatcagcgattcagatgcagcattggaattcagcgatgtatcagtgactcctcaaattgtcagtgcggatggtgttgagtggaaagatggaaagttcatagttaacaagaaaaatggagcagttacggtatcctttaatggcatgagcaattcggaactgtatgttgtctgggagagattgaattataaaggtattaatccgtatagtttgtatgatgaagataagttgaatgggatgtctgtttatgccagaaataatttgaaaaggaaatatcagtactggaaagaaccaagtacggctaatgttacagcaagtgcgaaggaaagggaatcaaagacaaccatttatacagataagaatccgtattattgcggacatcataattttatctgtaatttagggtattcaaaagacataagaaatacgcttacgttaacttttgataaaattggtgtttactcatatgatgatatgaaagttgttaatcagccgatggatcattttgatttatattgcagccaattaaaagaaaatgtactggaagatattgaattggaaacgaattcaattagtggacagatatctttggacgagagtaaagcattatgtattgcaataccttatagtagtggatggtccgctaaaattgatggcaaagacacacaaatactctgtgcggatgatatgtttattggattgatgttatcacctggaaaacatcagattgagttgagatatatgagtccgtatttaagagagggagttgtgttatcttgtataagttgtgtagtattcatctttttgctcgtaagacacaggaaaaaatataaagacagaaattaaaatcttatgacatttcagaatgaaaacgttgtataattgtaagaaattgaggagtatttaagaggagggtaaaagatgaaacagcaaaatataataaaaaaagcaatggcttttctgcttgtattctgtttagtggcagtggaatatggtagttgtgcttatgcagaaaccataagtgaaaccaatgagttcgctgaaaagcagcaggaaaatacaaatgagaaatcatcaacagacgaagtagcaacgacggaagaggagagtacagaaaagagcatagcagtagaatcgaattctgaaacagaaacaatggtacaaacagaagagacagttagtaaaaaacatgaaattaccggttttgtttcattagatgattcagaacggacaataacatgttcatatagcgataagccagcagaaacggagttgttggatgaattgccatctacgttaaaggtttatttggattacggaactgagattcaggaaatccctgttacttggcgatgtgcaggtgattttgatagtactgcttttttctattatgaatatgatcctatttgggataatgaaaaatatgaattatctacaaatgaaagtatgccatatattggagttcaactttatacaatatcaactttgagtattaccaataatgacaatgagacaattatctatgattatcttgtgaataacatggggcttaatacagcagcagcagcaggaatattagcaaatatttactgtgaatccagttttaatcctaatatatatagcagtgatggaacaagttatggtatttgtcagtggcgtgatgcttcggatgtgaagcggtttactgcactaaaaaattatactgaaaattggcagacattagaaggacagttggagtatttacattatgaattgacaacagattatccaggcttgatgaatagactaagaagtgtaaataataatgcagagggcgcttatcaggcggcatatgattggtgctataattttgaagtgccggcaaatacgaaaaatgttgcagtctcaagaggaaatttagctcgggatacttattggccatattattctggatttaacgatatagagaaggatgatatatctatttcaggagcaacggtaccacatcagatgaagaaagggacttcttttgatgtcagaggttctattacatctaagtacatattaacttcagtgacagttggtgtttatgattgtgatgatgtgatgcaaataggccagactgtagaacctaattcaacaaattatgatttgagaagaatagatacaagtcttaaatttggaagtctggaatcaggtggatatcgttatagggtagtagcacggacgggcaggagtgtaacaacgcttgtagatagcgcatttatggtactgagtaatggaagaacggtagcagacggaacatactatatagaaagtatgaagaacaacggatatggactgaatgtaagcggaaacagcaatgcctctggagccaatgtggtccttggagcgaagagcagttcaaactacatgaagtatgtattcagctaccagagcaacggttactataagatcaaaaatgccgcatcgggccagtatctgggagtaacaggtcaaaaatcagcatcaggaagcaatgtggagcaggcctccggagggacaaggtggcaggtgatcccggatggaaagggaagctannnnnnnnnntgcattggatctggcgaatggtactgtagccaacggaacgaatatccggatctggaattataatctgactgaaggccagcgatggaagctggaaagcacgacaacaagtacggcggcaccgaagatcagcggacagaccaaaccagcgacaatgaaggcgggaagtcccttcagcatccgtggaacggtaacatctgacctgccgttaacggaagtgacagtgggtgtgtatgatacagcaggaagtatgaagacaggaaagacagtgagaccgaacaccacaagctatgacctgagaaatgtggatacgagcatcaagttcggaagcctggggacaggcgggtaccggtataaggtaacggcaaagacgagtgcagggacaacaacgctcgtgaacagtgccttcatggtactgggaagcggaagaacggtggcggacggaacatattatatagaaagtatgaagaacaacggatatggactgaacaccagcgggaacagtaatgcctctggagccaatgtggtccttggagcgaagagcagttcaaactacatgaagtatgtattcagttaccagagcaacggctactataagatcaaaaatgctgcgtcaggccgatatctgggagtgagcggccagaaatctgcctctagatacttggctcagtagagccattgagcaagaagctcccacttcaaaatctgtgatttaagtggtgggagcatgtcactggcagagcttatgaccataggctggttaccgactatttatcgccatccaaccatttgttgatgcagtggcaaactacaccagccgcaacggcgataataaaagaaagcataaaaaatattttattgaattgatttgcagaaaataccagatttttttaattagatatggcgttttaaaaagtagtatgctagaatacatgtaggtatgctttgggtaatatgaacagattgataatgatttaacgaaataaaatcgtgcaatttgtacattttacaaaaagcagcagttacatcattcaattttaaggaggaattattccaatgaacattttagttattaactgtggtagttcatcattaaagtttcagttaatcgatatgacaacagaagctgtacaggcaaaaggcctttgtgaaagaattggcattgatggcagccgtattgtttacacaccagccggcggcgagaagatgacaatcgaatctccaatgcctacccatacagaagcaatcaagctcgttcttgactgtctgacaaacgctgaatacggcgttatcaaatctcttaaagagatcaatgcagttggtcaccgtgttgtccatggcggcgagaagtttgcaagctctacaatcatcactgatgaagtcatcaaagttatcgaagaatgcaacgaacttgcaccacttcataacccggctaacttaatcggtatcaatgtttgtcgtgaactgatgccaggtgtaccgatggtaggcgtattcgatacagctttccatcagacaatgcctaagaaagcatatttatatggtctgccgatcaaagcttacacagactacaagatcagaagatacggtttccacggaacatctcacagcttcgtatccaagagagttgctgaattccttggtaagccagttgaagatcttaagacaattgtttgccaccttggcaacggtgcaagtatctgtgcagttgacggcggcaagtctgtagatacaagtatgggcttcacaccacttgcaggtcttgtaatgggtacacgttcaggtgatatcgacccagctattcttgagtactatgcgaataaagaaggcctcacattaagcgaagtaacaacagttctgaacaagaaatccggtatggaaggtcttacaggcggcaagagcgacttccgtgatcttgaagaaggttacgaagcaggcgatcaggcttgtatcgacgctatcgaagtcttttgctacaatgtagcaagattcgttggtgcctatgcagcatctcttaatggtgttgacgttatcgcttttacagctggtatcggtgagaacagcggtttcgtaagaggcaagatttgcgaatatcttggatatcttggcatcacaatcgatgcagagcagaacagcaaacgtggtgaagatatcatcatctccacaccagattccaaggttacagtttgcgtaatccctacaaatgaagagctgatgatcgctagagatacaaaggctttagtagaagctcagtaatcggataagcgtatatagaactaccaagcggctgtcgttccatgaacaatcatggacgacagccgcttttctgtgatatatcaaaggtctgtatggttttcttttgtgtttttagcctttaattctccattccccagtcggcaatggccagcagcacatttgaaagtgttcggcccttctcggtgagagaatactccacatggggcggaatttcattgaattgatgacgaagaataatgccgtctttctccatatccctgagacatccggagagaactgtattcgtaattcccggaatattcttcgacaactggctgaaacgcagttgctcagaaccaaacagctggagcacgataaaaagcttccatttcccgccgatgatatctaatgtgtgcttgataggacacgtcatattaggatgggctttcataaaagaaatataatcatttacggactcaaattgactcataagaacttctgattctcccttctattgtgagaacataccatgattattcatccataatacttccgaaagagtgtgctggatggctgacaaagaaacactatgaataggttgtgaaccagaatggatttagaaacaggtgcattcagcatagccggcacttaggtgctgtcctttagcaccttacgtgccgctgctaatgctgcgcagcgagagcgaacctgtttttaaaccattctggttcacaaccgtttgagtggccatggtatgttccaccgtactatgttagatttatctgcgtaattgacacatctttaaacagcatgtatcatgtacttagtatataaaacataccataaattgaaatggaaaggaagatacaaaatggaatttaataaaacaattgcagcaagacagtccgtcagaaagtttacagaggcccagattacaaatgaacagttaaaggcaattcttgaagctgccaacgcagcaccggcctgcatgggccagtatgatcatctgcatctgacagttgttcagaaaccggagatcctggcacagatcaatgcggcattccagaaggcagtgggtgatccgaacatgcaggttacatatggtgcaccgacagtgatttatgtttcatgcaagaatgaggatgaagagattgtcaaaggatgcaatgcaggtgttgtcatggagaatatgctgcttgaagcggcagatcttggtcttggtgccgtttatctgtttggcgtaagccaggtgctttttgccaatgaagaaattacaaagctgcttcagattccagaaggcttcagaacagtttctgctattgctgttggtacatcagctgatgctcttcaggaaagaacactgggtacagacaaaatcagcacaacaacgctgtaaaacatatactgaattggcacaataatcctgttaatacatatattgaaccaggagtattgagtgacagggaggccctatgcgccgatttctgattggatggattctggttgtccttttactgccttttgcagcagcgtggatttatagtgaatggtcagagaaaaaccagcagatagaacaggagtcatcgcagattcaaattgatgttcagacggtatcgggtgtgcagagaatggggacttcagatttcctcatcggtgctattgcaggccagataccggcggagtttgaggtggagacgttgaaagcgcaggcagtcatggcaagaagctgtctatacaaacaggctggagatagatattatatttcggcttcggatacggggatgacctggtgcagtgaaacagaacgaaaaaagatgtggggaacttcctacaaagagaataatgacagaatccgtcaggcggtccgggaaacggacgggcagattctgtattctgaaggcgggcagatgattttgcccgcctggttttatatagggaatggaaagacaagaagcgcgaaagaggcatggggagaggaaacgtcgtggtttcagtcagtggaaagcagctgggatacagagagtccagagtatgagactacgacagaaatgacaaaaaggcagctgatccgacaaatgaaacggtatgatccggcatttgattgcccggcagagacgttggcctcaaattgtgagattacagcggtggacagtgcaggctatgtgacagagatccagatcggcaaccggctgatgagtggagaagatttccgctatgctctggaactgccttctgcctgttttaaaatagcttttgaaagcaatcgggtacagatcagagtctatggccgtggacatggtgttggcttcgatcagtatggagccaatcgtcaggcaaaagagggtaaaaactacgaacagttattacaatattatctgacaggggtgaaagtaggggaataggcttgttatgtctgctgcttttgtgataaaatgagcgttagcggacagaagcagaaaatctgttttggttgaattgcgaaaggaggcagaaaggcaagtggcaagtctgagtaaaaagaagccattaagtcgtcggcaggggcttgcgcgatatttgcgggaactggaagttgttgattatcgactgattatatcgattgtttttttgtgtgtgtttggcttgatcatgatctacagtgccagtgctgcggaatcaggagtgtctttggtgttgaagcagttcggaatcggtgcgggcggatttgttttaatgtggatcgtttcatatgtagattatcatttttatgagaaaatagcaggaattatttatattggggctgttctgtccatgtttctggttaaggtgccgggacttggtgtgaccagaaatggtgccagccgatggattgatattggtcccttttctttccagccgtcagagtttgtgaagccggcaatggtgatccttatggcctatttgctgacacgtatgggacgaaaactgtcgacattgaaagcggatattgtgctgctgatcccaggcgtgattgcggtaatggtgattctggttgtgaccaggaatctgagtacggctttgattgttctgggtatcattgcattcatgttttttattgcttatccgacgaagaagatatggcggctgattgcagtaataggtgtggtgatcgtgattggttggcttggctattatcattttgtcattgtgccgaaccatacgatgacattgaccaacacagtgacagaggcggccagcaagtctttccgagatgaccgtattctggcatggctttacccggatgattatccgcaggcttctatgcagtccagatattccatgtatgccattggttttggcggtatccttggcagaggtctgggaagaggaaccatgaagtattatctgccgttttccacgaacgactttatttttggtgttatcggtgaggaattgggcctggtaggatgcggactggttgttttcctttttgtttatcaggtgtggcgtatctttactgtggcgcggcatgccaaggacaaattgggcagttatatggcatttggtgtcggtattcatgtggcgctgcaggtaatcctgaatattggcgttgccacaggcgtgctgccgaatacaggtatcagtttgccttatatcagttacggtggtacagcccttcttctacagttgtgtgagatgggaattgtactcaatatcagccgtcagattccgggcagacgggttcgaatcggtgattcatcgcagaaatcagagcacgaagagcaccgtcagatacatgcggcttaaatcacatcagtattttagatgtctcagcaaaggaaatgaattttgctgagacattttttatgaaaatgtgtatactttcttcgcagtctggtcagaatatgaccagaggtgataagagtgaaaaatataatgaatattttcaaaaagaatgggttttatgtcatggcactggtgcttgtggcaggtattctggctgtatcgggtattgccggatatgtttcgggacagaaagaacgcggtgcggaaaatgcagtggatttcaaggatgatggggccggaacggccttgaatgcaccggcatctgctgaaacggatacgcccatcgtggatgagatgacgggttataatgcggatctggtacagaaaatattgtcaatgatcgaaaatggcagtctggcacttgaagattttgaagatgaagggtctatgaatggacagtcaggtcaaaatgtttcacaggaagcgtctgcagagctggctgatgatgcagcaggaacagaggcggatgcagcggttaatgctgagttggatgaatcggatgcagaaatggcaggcagtgtgatcaatgcaggctatcagtccggtgatccgatgacatggccggttcgcggagagatcgtgatggattacagtatggatgcaaccacatggtacccgacacttcaggagtacaaatgcaatccttcgattttaattcagagtgaagaaggaacggatgtagcggccgcttttgaaggaacggtcaccgatgtttacaatgatgtccggttgggcaatgtagttgagatgtctctcggaaatggttatgaggcttcttacgggcagcttgagaatgtggatgtggctgtgggtgacacaataagtcagggagaagtcattggtgaggtcagccagccgacccgctactattcagttgaaggcagtcatttgaattttatgctgacacaggatggaaaccctgttgacccgctggattatctggattaaagacaatggaatgatccggagaaattgtagatggtacctttttgaaaaccgggcataagatatagaggcggatgaaaaaatggtacatattgaaaaatatgcaaccgttttttacaacagccctgcacagatatcggctgttaaataacaattttcatcggctgctttatcatataagggcaggtgtcagtaagacatctgtccttttttctgtgagggagttacagagaaatcagattgtctattgtttaaatttccttatatggtataatattgtcaggacaatttgaaaacggaataggaagcagctggtgccgcggggagcggagaatagggaagcaggtgaaagtcctgcgcgatctcgtcactgtaagcaggagtccattgctattatgtcactgagtcatcgggaaggcagcaatgggtgtttgaactgtgagccaggagacctgccagactgtggtacggggaatataggttccgggtcacgaggattggctgtaccgaatgtatgaacattttttgttttttctcccgacttttccttttcgtttatgatttgtcacaatatttctatttaggaggaagaacaacatgaagaagatgacaacattcgtatgtgttgcagccattacagcctctcttttagcaggatgcggcagcaagacagcagagacaacagcagcatcaacagaagcagctgcagcgacagaggcagcatcaacagaagcagctgttgaaggtacagatgcagacaaggaagcagccaagaaggttgcagaccttattgatgcaatttatgtacaggagagaaatgacaacacagatgagcagtgcaaagaagcaaaggctgcatgggatgcactgacagatgcacagaaggaactggttgaaggcgagaatgcagatcctgattatttcggcagagatacaggtgatgcatccaaggatgacccgcgtaatcaggatgacatcggcgagaacgagctgctggtagtcagctttggtacatctttcaacgacagccgtgtgaaggatatcaaaggtatcgaagatgctcttcaggaagccaatcctgactggtcagtcagacgtgcctttacagcgcagattattattaaccacgtagaagcccgcgatggcgaatgcattgacaatatggatcaggcgctggaacgtgccgttgccaacaatgtgaagaacctggttgttcagccgacacatctgatgcatggtgcagaatatgatgagttaacagcagccgttgagaaatatcaggacaagttcgaatctgtgaagattgcagagccattactgggtgaagttggtgatgatgcgtcagtggttaatgatgacaagaaagcagttgcagaagccattacagcagaagcagttaagacagcgaattatgattcactggaagcagcgaaggaagacggcacagcatttgtattcatgggtcatggtacatctcatacagcgaaggtttcttacagccagatgcagactcagatgcaggaacttggttatgaaaatgtctttatcggtaccgttgaaggtgaaccggaagacacagcatgtgaagcagtcattgaagcagtgaagaatgcaggttacaagaaagtcgttctgcgtcctctgatggttgttgcaggtgatcatgccaacaacgatatggccggtgatgatgatgattcctggaagagccagtttgttgcttccggcaactttgacagtgtagactgtcagatcgcaggtcttggtgaaattcctgcaattcaggatatttatgtagcacatacagctgcagcgacagcgattaaatagatacagcagactgagtgctgaatagagagaaataattacgagtaaaggattggacataagatgaagaagaaagtgattgtattattatgggcagttattctgtgctgtacactggcagcgggctgcggcaagaagaatacattagcagatggtacatatacggcagatttcaatacagacagcagtatgtttcatgtgaatgaagcttatgacggaaagggcatattgacagttgagaatggacagatgacaattcatgtttccatgccgtccaagaatattgtgaatctttatctgggaagtgccgaagatgcacagaaggatggcgcagagctgatccagcctgtgacagatacagtaacttattctgacgggacaacagaagaagtgaatggatttgatgtgcctgtaccggttatcgatgaagaatttgatctggccttaatcggcaagaagggtgtctggtacgatcacaaagtcagcgtatccaatcctgttgctgttgaagagacagacagcaaataaaacagttgacaaacaacagataaaagctgacaataataaagacggggctgctgcggaatgtatagggcgttttgcagcagccctttagtaataagagattttgcagcagaatttataaagagttgattttaacagagggggaggattgcgtgtatggaagtatcagaaatgaatctggcggacggtgaatatacggttgaagtgaccatggaaggcggcagcggccgggcttcaatacagtcgccgacagaattgacaatagaaaacggacaggcacaggcagaaatcgtctggagcagttctcattatgactatatgatggtggatggtgacaaatatctgccggtgaatacagaaggaaattccacatttgaaattccggtgtcggtttttgatgaatctatgacagtgatcggtgataccacagcaatgagtgtgccccatgaggtggagtatacgctgacatttgcctcagagtctgttgcatcggtacagagcagcggtggaaacggcatgggcggagcaggtattgcgattgtactggcgcttgtggtggcagctgtatcatccatgagattgcgcagacgtaaaagtagaaggatatagaaaatgaagaaaataattttattattcatagtgacaggtatactggtcgggatggtgaccgcttgcggttctgccgctgacggtactcagaagacacatgacacagaaatcagtcagcagctgaccttcgaccacagtgagacgttggattatgcacagaagttttcaatcgataggtatcaggatgattatgctttggtgacgattacagatgacagccggtatcttgttgttccggaaggaaaagtggcaccggatgatctggatccggatattgttgtgattcagcagccggtacagaatatttatctggcggcttcggcggctatggatatgtttgtgtctctggatgcattggatagtatccgattcagcagtctgaaagcggatgggtggtatatagatgaggccaaacaggcaatggaagccggagatattctttatgctggcaagtattcaaccccggattatgaaaagatcgttgaacagaactgcggtctggccattgagaataccatgattctgcatacaccggaagtgaaggaacagttggagaagttcggtatacatgtgttggtggattattccagttatgagccggagccccttggccggacagaatgggtgaaactttacggcctactgactgggcatgaagcgcaggcggataaggctttcgcagaagaaaaggctgcttttgaagaagtgaaaaacagtgtggcggatgaagctgatcaggaaccgaaaactgtggcatttttctatatcacaagcaatgggcaggcaaatgtccgcaagagtgcagactatctgccgaaaatgatcgagctggccggcggacgatatatttttgattccctgggggatgaggatgatgccatgtcaaccatgtccatgcagatggaagagttttatgcaggagcgaaagatgcggattatattatctacaacagtaccattgaaggagaattatcttcagtggatgatctgctggcaaagagtccgctctttgagaagttcaaggccgtgcaggaagggcatgtttactgtacatcaaagaatctgtatcagtcaacaatgtcgcttggaacgatcacatcggatatccgccggatgctgaccggcgatgatgcggatctgacatatatctacaaactggagtgaaagatgaatgaagagtagacgatacggcgcagcttttgcgatattggcagccttgctgctgattttgctggcaatgaatttgtgtattggatcggtgaatataccattgtctgaaattctgcatatactgatgaaaaacagcggcagtgacacctacacggatattgtgatgaacattcgttttccaagagcactggctgcggctgtgttgggcggtggtttggcactggcaggctatctgctccagacgttttttcataatcccattgcgggaccttttacgctgggcatttcttccggtgcaaaactggtggttgcccttgtgatggtggcctctctcggcaatgccctgagattgagttcatgggtgatgattgctgcggcttttgtgggggcaatgatctgtatgggatttgtgattctgatgtcaagtgtgattgagcagatggctatgctgatcgtcagcggtgtgatgatcggctatatctgttctgcagtgacggattttatcgtcacctttgcggaagatgcggatattgtgaatctgcataactggtccaagggcagtttttccggtatgacatgggagaatgtcaaagtcatggtgctggtgacgggaattgcctctatcggtgtgtttctgttgtcgaagccgatcagtgcctatgagatgggtgaggcttatgcggccaatatgggactgaatgtgaagagattcagagtccttcttgtattgctgtccagtgtgctggctgcctgcgtaacggcatttgcgggtcctgtatcctttgtggggatagcagtgccgcatctggtgaagtggctgctgggcaccgcgcggcctattctgctgatcccagcctgttttctgggcggttccgtgttctgcctgttctgcgatctgctggcaagaaccatgttttctccgacagagttgtccatcagcacagtgacagccgtgtttggtgcacccgttgtcatttatattatgatacacagaagaagagaaaaggcggcataggataatgagggaagattacttttacacagaggggctgactgttggttatcagggtgtgcccctgatcagagagattgcgttccagctgaagaaaggtgagatattaacgctgatcggacccaatggtgcgggaaaaacaaccatattaaagagtcttattcgccagttaaagccactggacggcgtaatcgttctggaaggacagaagaccgatgagatgagcggcagagattttgcaagaaagttgtcagtggtattgacggaaagagttcgtccggagatgatgacctgcaaggaagtggtggcaacagggcgatacccgtataccggtaagttcggggttttgtcgaaagaagattggaaaattgtcgatgaggcagtcagattggtacacattgaggatctggctgaacgggattttacaaagaccagtgacgggcagaaacagcgtgtcatgctggcaagggctttatgtcagcagccagatatccttgtgctggatgagcctacatcttttctggatatccgctataaactggaatttctctcgatcattcaggagatggcaagaaatgacaggctgacggtgatattgtccctgcatgaactggatctggcggaacgtatttcagataaagttctgtgtgtcagaggggacaggattgaccgcttcggaacaccggaggagattttttgcggagactatatttctgaactttatgggatgacggccggtcattatgatgccggcaccggggagttggagctgcagcctgtttcaggggcaccgaaagtatttgtcattgccgggggcggcaggggcaaggctgtttttcgcagacttcagaggcagggcatgccatttgcgacaggaattctgtgggagaatgacctggattatccgtcagcaaaagcattggcggttcagacggttgcggtgcgtacattttcagcggtcgatgcagaacatattgagaaggcaaaagagctgatagatagttgtgaaaccgttttgacagtatttgacagaacagaatggacgaaactgccggaagggttgaaggagattcttgcgtatgcagaagaaaaaagcaaactcacagaataatgagaagaaaaaggttgatgtctgcggagagaacggcgccgcggaaaaggacagatgctatacgtatatggtgcgctgctcggatggttccctgtatacaggatggacggtgaatcttgagatgcgtgtagtggctcacaacagcggaaaaggggcaaaatatacaaaaagcaggcgccctgtgactctggcttactatgaagtctttgagaatcgacaggacgccatgcgacgtgaatatgcaattaagcaattgccgaagaaagagaaggaaaggctggcagcctaccaccatctgtcttcaatggcaacgtagtctttgtggtggccgacatacttgtaagccggacggatgatcttgccttcattggccagttcttcaatacggtgcgcacaccatccggagatacgggaaatggcaaaaatcggtgtgaacaattccatcggaaggccgagcatggtgtagacaaaaccgctgtaaaagtccacattggcacagatcggtttgaacagctggcgatgttgttgcatgagtttgatggcaatgccttcaacacggttgtaaagttcgaattctttggtcaggcctttctcgttggaaagtgcctgggcatatttcttcagaataacgcatcgtggatcggattctgtatataccgcatgaccgatgccatagatgagtcccttgccgtcaaaggcttcgcggttcaggatcttgatcagatactcagtaacttcatcatcatcatcccagttggtaacatgttcttcgatatctttgaacatttgttgaaccttcagattggcgccgccgtgttttggccctttcagggagccgagggaagcagcgatggctgaataggtatcagtgcctgtggaagtaacaacatgagtggtgaatgtggagttattaccgccgccgtgttctgcgtgaatgatcagcgcaatatcaagaaccttggcttcaagttcggtataccggccatccggacggagcaggcggagaatattctctgctgtcgaaagttcaggcttcggacggcggatgacaagactcttgtctaatatgtaatgacgatagctgtggtagccataaacagcgatcagcgggaatcgtgcgatcagctgaagagactgacgcagaacgttattgactgaaatgtcttcaggatggtcatcgtaggaataaagtgtcagaacactcttctggagtacattcatcatgttggcattcggtgcattcatgatgatgtcacggacgaaattgtccgggagttcacgataatttccaagaatatcaagaaattcctgaagctggtccttgttcggcagctcgccgaagagaagaagataggtgatttcttcaaaaccaaagcggcttgtcttattgccttcaacaagattcatgacattatagccctgataatagagctggccatcaatcggaatcttgcggccatgtacggatttgaaagcgacgacatcggagatctctgtcagaccggtaaggatacctttaccgttggagtcacgcagaccacgtttgacatcgtactcaatatacagatcctggtcaaaacgccctgaattcatgcagtattcagcaagcttgtccagacggttattaaattctgtcatttctttagccattattgttcaatccttttctataaaaatttacataattgcattataatatgaaaatactttatcattatattggtgtttttgcaagttgtttttttgattttatgcgtcagtgcagaagaatggatgaaaatattgatatgcaattatagaaaataaaaatgtcaaaatgtataaaaatgaagaaaaaacgcaaaaaaagtagatttatcgaagaaaaaccacggataaatacaaaagaaacttacgctttttgaagagattgtaaaaatttgtgtaaaaaatgcaagatataaaatgcgtttattcaaaatgtgtaggcatattctatgcagaaaataaaggaaatagagaaaaatgatgaataatataagacataaacgtataaatatgcataaaggcgataaaaaagaaaaggagggtgttgacggtttaaaaaagaactgctagagtattataacagatagaaggaaatacaaggagtttggaaaggtgagaaaatggaggcattaaaaaataattcccaggcgattgtaagggcattgacagtagcggttgctgttgttttgcaggcgattacaatggttctggttggacggtatcttcatgaatatgcttcctgggcttatgtcctgttggaaattataagctttttgcttgtgtttggtctcattaatgatcaggagtcctatcgtcagttctggtgtgtcatcgttcttgtttttccggtgacaggcctgtttctgtattatatgtggggacagcgaagaagaaacagcaagacacatattctgatcagggagacagaggcgaagatgcgccagtatgtgccgcatcagccggaagttatggaggaattgcaggaactgcatccttataaagttcagattgctcgttttttgggaagtgaaggctttaacatgtatcgtcacaccgatgtgaaatattttccgctgggtgaggaaatgctggatgcaatgatcgaggatctgaaaaaggcagagaagtgtatctttttggagtattttattatcagtgacggcgtgatctggaagagagtcaaagaagtgctgatcgagaaggcaaaagcgggtatagatatccgtttattgatcgatgactttggctgcctgggaatcaacaccgcagaatttcgtgatgagcttgtcaagtccggtattcgactggcggtgtttgcccctatccataaaaatgtcgacagattgtcctttaactacagaaaccatcagaagattacaattgttgacggcaacatcggctattgcggcggtattaatctggcggatgaatatgccaatattatccagcgttttggacactggaaggatacggcgcttcgtctggagggtgaaggtgtgtgggggttgacatcaatttttcttgagatgtgggaagtggcgatggggtatgagattaccacggattatacggtttacatgccgacggtcaaaatgcccagtgacggatttgtgcagccgttttgtgatgggccggccaataatcccaataatcctgcggaggatgtgtatacgcatctgatcaataaggcccgggattatgtttatattacaacaccgtatctggttattgacaggaagatgacggaagatttgtgccgaacagcccgaagcggcgtggatgtgaagattattgtgccgcatatctatgacaaatggtatgtctatatggtgaatgtggccaattacgggccgctgattgcgaatggtgtccatgtctatgaatacatgcctggctttatccattcaaagacggttgtctgtgatgatgagtgtgcggtctgcggaaccatcaacatggattacaggagcttttatctgcactatgaatgcggtgtgttcacttgtgagtcatcggctgttgcggatatccgggatgatattcatgagacattgaaacaatgtcaggaaatctatctcgatgagtggcagagccgtccatggtacgaaaagatcgttcagtgggtactgcatctgtttgcccctgtattgtaatatcagaaacgtgtacggtagccgcagcgacggcacagattttcatgaatatggtgagaacggaagtcttcgatgattcggagacttttttctttgcacagaatcgtatccagggattctatgaaaatattgcccaaagccagatggccgttgtggtccagacaacatggaacgacctggccatctgccagaatcgccaattgatgccgcaggccatggcaggtgccgttgaaaccgtaatccggtgcgtgttcatctggccattcaaaaagctggtcaaaattcacataggtatggggtgcaatggcgttgccgtgaaccttgcccacataggcgtcaatgggctgggccagatgataggccttctcaagggtttcgagaataaactggttgcgaaggcgctggtcagctttggcagtaccatccagattccagagtcggaagctgatatagcccggtgttgtcattgtaaaagtccgggcaaaatcaatagcattctcaagataggagcggaaatcccgggtatgcatggtattggcatcaaagctgtgcagggacagagaaatctgacggggtgctgtttcgcccagaagcagctgatgtttttcgggaagaagcactgcattggtggttagattaacttttaatccgttttgatgggcgatggccaaaatatcgccaagccatgggtgcatcagcggttcaccttttacatgaaggcaaatgtagtctgtaaaaggggttacctgtgcagcaatctttgcaaattcatccacagacatcattcttgccggacggtcactggtgggacagaaactgcagctgagattgcagcggttgatgatttctatataaattttctgaaaacgtttctttttcatgataaaacctctttttataaagtcataattcaataatatagattctgttgaaaagtgtcaagttgttgaaaatcattaaaagaatggctgaatgtgctgccaagctggtcctcaattaaaaagtaactgaaatgcttttttataatggttttaaagaaatctgtcaatatagataaagatatggtatactgtgagtaagcaaattcagattgcgatttcattgacgaaaggatgtttttatgaagaaagtattgacaattgccggttccgactgtagcggtggtgccggtattcaggcagatataaagacgatgacagcacacaaggtttatgcaatgagtgtaattacggcattgacagcacagaacacaacaggggtttatggggtgctggatgcaggtgctgattttgtgggtcagcagatggactgtgtgttcaaggacatttttccggatgctgtcaagattggcatggtttccaatatcgagacgattcagatgatcgcagcaaagttaaaggaatacaatgcgaagaatatcgtggtagatccggtgatggtttccacaagcggatgcgcgctgatgcagccggatgccatggatacgctgatttctgtcctgctcccgatgggggatatcattacaccgaatatcccggaagcagagaagctatgtggttttgagattaagaatgtagatgacatgaagaaagcggcagaagtcattggaagaaatctttcaggcagcgttctgattaagggcggacatttgacagagactgcagatgaccttttataccatgacggtgaatttatgtggtatcgcggagaacgtgtcaataatccgaacacccacggcacaggttgtactttatcatctgccatcgccagcaatctggctttgggttatgatatgaagacaagcgtacagaatgcgaagaattatatcaccggtgctttaaaggatggacttgacctgggagagggaagcggcccgctgaatcattgcttcaatttataggaaatttgaatgacaggagtgggatataaccaaatggagagactgattatgctgggaacgggcaatgcccttgtgaccagatgttataatacttgttttgcaattcaggatgatgatgaatatttcctggtagatgcaggcggcggcaacggcatcatgcgccagcttcaggatgcagatatttccatggcgcagatccatcacatttttctgacccatgaacatacagaccatttgcttggtatgatctggatgatccgtatgattgcaacaaagatgcgcagggaacagtatgaagggaatcttcggatttattgccacagtgcattggtagaaacagtacgaaccatagccaatctgacattgccgaagaaatttacaagacttttggatcatcgtatccagttcgtaccccttcatgatggggatacgaagcatatcctggattacgatgtgacatttttcgatatcttatctaccaaggctaagcagtacggctttacaatgcgccttaaaaacggacagaaactcacctgtgccggggacgaacctcttaatgagaactgctttggttatgccgaaggcagtgattggctcatgcatgaagccttttgtctgtattcgcagcgggaccagtacgatccatatgagaagcaccacagtaccgtccgtgaggcctgtgaactggcggcttatctcaatgtaccaaatcttatcctgtaccataccgaggacgacaacatcgaacgccgaaaagccctctatacagcagaagggcggttatattacaaggggaatctgtatgttccggatgatctggaatgtatagaactcgataaagaagaataattgacgtctaaataccatatcgttggcatttcttgaccagtgttgaatgatcaatgccgagagccgtggctgccttccgttttgtatggaaggtagccagggctttttctataatgtgcttttcgagtgcaatggtggaagctttcagattgtactcatcttcgggatgggcataggaatctgtgttccggataccaagcaccagggccaccattttcttgtcgataatattatcttgatttataacgacaagacgttctgtgacgttttctaattcacggatattgcccggccagttgtaattctccagaagatgcagggcatcactgtagatctcgatgggcttgttgtattttttggtatatttttcaaaaaagtgataaaaaagcacttctatatctgattttcgttctcttaaaggaacaagctgaattggtacaacgtttaatcgatagtacaagtcttctcgaaatgtatgttcctcgatgcattgaagtaagttcctatttgtggcggcaataatgcggacatctacggggatggctttgtgaccgccgattttggtgatctcgtggttctgcaggacacggagcagcttcgtctgcatctgaactgacatttcgccgatttcgtccagcatcagtgttccgccgttggccagctcaaaaataccggttttgccggacttgctggctccggtgaaggcaccgggctcataaccgaacagttcggattccatcagagtatccggaatggcggcacagttgacctttagaaacggtttaccgaaacgtttgctggcctgatagatctgattggtaatgacttccttgcctgtaccgctttcaccggtgatcaggacggtggcatctgtcggagcaaccgccagggcagtagaaacagcctgatacatttgatcacttttaaaaatcacttcggactgctgaatttgctgggtacgcagataactgttctcgttttctttcttctcaatggcgctctttaactggatcagctggtccttgacggtttcaagctgctggatatcacggtcacaggcaactgcgtatttcaattcgtgcttatcattaaaaatcgggaatccgctgatgtggaccgtggtattcgtctttttcatcacaccgataatctcggatcttttttgatatttcagaatggtgggaaggataccattggtgtaaagtttcttctcacgattgatctggtgaacattttcaccaataatctccgctttcgtgataccgctgagcttggtgtaggtatcattgacataaatgctcgtaccgtccgggcttgcgacataaatggcatctggcaaattgtcgcaaatctcttcaaaatcaatatattcagtgaaaagatgatgctcgaaatgctgtatcattttgtccagttccgaaaaaatagtgcgctgttcctcggatagtccagaggctttcagtttgtctatctgtactttcatacgcaggtaatcctgttcaaatcgaccgtgttggctcatgttatcctcctaaaatcgataaaaatataacgatggtgataaaaatcaccatgtggtgaatataatcactttattttgctgaaaagtatacactttttggtcgtatttgtcaaatagttcccttaaaaaccattaaaaaactggaaaaaacgcataaatgtacacataaaagtacaaaaatgaggcggaaaataaagttggcacagatgttgctattatatattggcgtaaggaattattagaaaaatttaataattaatttagattttaaaggagagattaacaatggcaaagaaaactattatcacagcagcagtaacaggcgcatggccaaagaaagagaataaccctaacgtaccaatgactccatcagaaattgctgatgacgtatatgcttgctggaaagcaggtgcagccatcgcgcatcttcatatgagagatgacaacggcaacggtacaatggacaagaataaatttatcgaaacagtgaacctgatccatgaaagatatccggactgcgatatcatcctgaacctgacaacatccggtgatatctatgcaacagatgatacacgtcttgaacatgttcagattctgaaacctgagatggcttcttatgactgtggttccatgaactggttaaatgccagcctcttcatcaacagccctgcattccttgagagatgcggtaaactgttccaggaattgaatgttaaacctgaaatcgaagctttcgatcctggtatgatcgcaaatgcagcttactatctgaagaaaggtgttctgaaagcaccattacacttnnnnnnnnnnggaaacaatggatcagctttgcccgggttctacatggtctacattcggtgttggacattccgcaatggaaattatgtacgcagcagttgctttaggcggccacatccgtgttggcatggaagataatgttatgtactccaagggtgttcttgctgacagcaatgcacagttcgttgaaagagctgcccgtgtgatcagagaatacggcaatgaagttgctacaccggctgaagcacgtgaaatccttggtttaacaaaataattgagtcgggaacttcacaggaggtgtgaaatgacctggggaccaatgtatatgtattatcattgcccgaaatgcggcctgaagtttgagtatgccgttgacatgatcccggatttcggtgagaaattcggatattgtccgaaatgtgatgtcatgggtgtgtacgagaaagacggtgcgcgtcagcctgatgatgcagattatttagaagttgaataaatgtcggtcggctgttcagaacatgacgaaaggacttcagaattattttgaacagccgtatcaatagaaaaataggagaaacgtcatgaaagaagttaaaaagattttaatttgcggcggcggtatgatgggaagcgccatcgcacaggttttagcaggacttgacgatgtcacaatcacagtatatgataaattccctgtagatattgaagcaaagatcagaaacaacatgaaactgctggttgaaaaagaaatcgtgacaccagccgatgttgataaagtaatcagcaagatcagcttcacacaggatatcgagagcgaaggcgttaagaacgcggatcttgtggtagaatgtgtactggaagatatgcagctgaaacaggatctgttcgcacagctggaaggcattgtttctgaagataccatcttctgtacaaatacatccgttatgagccctacagaaatttctgcaaaatgcaaacataaagaaagacttgtaggtacacatttctggaatcctggcttccttattccactggtagaagttgtcagaacagaagcgacaacagatgaagttgttgaaactgtgatggatatgctgacaagagcaggcaagaaacctgttctttgcaagaaggatgtacctggattcatcgccaacagaatgcagcatgcattatggcgtgaagcgatttccatcgttgaaagaggtattgcagacgctaaaaccgttgatgatgcctgcaaatacagctttggtttaagactgccatacttaccgccgctggtaaattctgatatggtaggtactcagctgacttataacattcatgattatgtattaaaagaccttgaagacagccatgaaccatcaccacttctgaaggaaatgatcgatgaaggcaagatgggcttcagagccgagacaaaagacggcaagaagacaggttttatgtcctacactgaagatgaaatcgctgagatcaacggtggtctgaatgaatatctgatcaagatgttatacggtaaataaataataaaataactgctcgaagacgtttttaactgtcttcggacagttaaaaatttagttctctgggggagacagagggttttaaaagagagaaagggagtagattatgagcgagaagaagagaaaaggaacaccgctttggcaaatcagtaagaaatttaattttgcagctgagaaaattattccggattcatttgttttctgtgtcgttttaacgctggtggtagctgtgttatcattgacagtttgtcacattggacctgtagaattgttaacatcttggtgggatggcttaagcagccagttcacactggcattccagatgggcctgatggttgttgtttgtgcaacatgtgctcgaagcccacaggtttccaagttacttgatggccttgcaggtcttgtacacacacgtgtagcagccctgattctgttaatggcttttggttatgtatcatctatgctgaactgggctttctgtacaatcgttacacctatcctggctatgcagctcgctaaacgtgtcaaaggtcttcatttcccaatgatggttgccggcggttactgctgtatgattcttggccagtgccttggaccatccgcaacactgtattcaaaccttgcgacagaaggcagcaactatgctgaaatcgtaggtaagacaatgacagttgctgaaacttgctacaacccggttaacgttgtactttgggttgtcctcgctgtttgctttattgtgttagtattatttacacagccgggcgatgacgagttagtagaattaagaagtatcgcaacacaggccgatgtagcaccaaaggattaccagagccgtgaaaaagctacaacaccggctgaaaagatgaacacatgcaaaccaatcatgtgggttgttggtgccgctatctttatctatatcatttattcaattgcaacaaaaggtttctttgcaacattaaatatgaacatggttatcttcatgttcgttggtatcaactgcttcctgttcccgcagccacattcatggatggaagcacacacagacagcatgcatctggcaacagacgttatccttcagttcccattctatggtgcgatcatgggtatgatgtatgttgaaggcggtcttggttctgttatcgttaatgcaatcgtatctgtagcgacagctcagacaatgccgatcttctcattcctgtcagcttgtattgttaacctgttcatcccgtcacagggtggtcagttcactgttcagggtcctctgatcgtacaggctgctcagtctatccctggtacaaaccttgttaactgcttgaatggtttcgtatttggtgatgagtgtacgaacctcttacagcctctgtatgttatccctgcactgtctgtagtaggtatgaaactgaaagatgtatggggcttcatggctttcatgtgcgtattctgggtagttatcacatgcctgggcttatacttcattccaatgttcatttaaaacttgtatttagaaaagaaaaagtttctgaatttgcaaaatccttaattatgtattaaaaagtctctctatcaagattttaaaaacttgatagagaggctttttgattgcggcggaagctggtggatgcgatccgttcgtaattgggatgagtgcacttaaagtgcagatccagttccagatatgtgaaaccttaatctgttaataatggaaaatcttctgcagatttgttagtgtagaaaacagttttatgatatactgcttatagtctgacttgaagggagcatataaacaattaatggaagaacgtttttttacacataacaggggattttataaaaccttttttggcatgatgcttgttctgactttgcagaatctggtagcctacagtgtgaatatggcggataatctgatgttgggaagctacagtcagaatgcgctgtcaggggcagccacggtgaatcagatatttttcatggtacagcagtttgcgctggcttttgggaatgcacttgtcgtacttgcttcccagtattggggagagaataggaaggaaccgattcgagtgctgacggggattgcgttgaaggcgggactattctgcggaattgtgattgtggtgctttgtacagtgatgccaaaacagctgcttggcctgtttactaacgcaccggaaattatcaatcagggacttgggtatctggatttgttgaagtggacatttgcgttctatatcataacgaatattttgatggcagccctcaggagtgtggaaatcgtcaatatcagtttttatatatctgttgtttctctgattatcaatgtggctattaattatacattgatttttggacggtttggcatgccggagatgggaattatgggtgcggcgattggtacacttgtagcccggattctggaactggtcattgtggtgatttatattataaaagataagaaaattgagctgtttaagcaaaaactgttgcaatcagacgattccttacgaaaagattatatgaaagcggcgatgccgattattctggcacagattctgtggggtgtttctgtgcccatgcagacagccatccttgggcatttatcagatgacgccattgcagcgaattctgtggcaacaaccttctatcaatatttgaaagtgattgtcattgcaatgacatcggcatcggcggttatgatgggaaatggcgtcggaagaggcaatatgaaacggattcgttcagatgccagaacattggcaacgatcgatgtagctgtaggaattgttctgggaattatactgtttgctttgaaaaatccattactttctatgtatcagttatccggagaagcactgcggctggcagatcatctgattgtgattatgagttttgtcatggtgggtatgtcctatcagatgccggtcagtgccgggattattcagggcggcggagatacgaagttcaatatggtgatgagtatgatcagtacgtgggcgattgtcatgccattatcctttgcggcagcattctggtggaagctgccggtagaactggtcgtcatcgtgattcagtcggatcagttctttaaaggaattccggcctttatccgctttagaagttaccgttgggtaaaaaaattaacgaattgatataagggactgatgcatggttacgtgcgtcagtcccgtttctatacagctgttgtcaaggctgaaaggatatcctttggatttcggcttttgacagacaaagtataatgtggttcattgatatgctccagataatgggcatcagaatcgctgatgatatggcagtgttccagatagggatgctgttttttcagttcatggtacttggacatatctttgatctcggcacaggtaaactggctgtccggcggaatgaagcccaggttggccagcagactgttagccgttttgtcaatatgggcaggtatcatgatcccgttgtaatccctggtcagagcaaagacgtcatcaaatgaaatcgttgtggcgttgatcagcagatttgggatcgttccgatcacttcatcgtctgcattatagagctgctgtttgccgaaaatcttctcgttattcgggacggccatcagatgactgtagacatattcatcaaaggccagagcatccgctaaatcggcaaaaaggcagaccacatgtacttcctcggaagtggtcagctccattcctggaagggcggtcagaccgtaagcctctgccatagtcaggactgcgggacaattcttgcatgaattgtggtctgtcacagcgatgagatcaaggcctttgatcatggccatacccacaatgttggccggtgtcatatcatcatccccgcatggggaaagacaggaatggatatgaagatcatagtttaaatcaggcatggatgcgctcgtgaaccttcagtgcggcgtcaaaaatcggcatatccgtgctgagaacggtaatatgctgctggacagccttggccctggcagcatcatccagagaaataccctcggcgagaacaatgcagccaacatcacacagggcagcaacagccagtgtattgatattccccatgactgtgacccatacgctgtcttcaggtgccttgctcatggcaatgctcagcaggtcacagcagaaaagtccggagatgttgcggtctgtgtcatctccgacattgattgtcttaaataagccgctgtcaattaattctttaatggtcatggtcctgttcctcctcggattcagcatctgaattaatcagattgtgtgagtcaagcaatgcgatctcttctgtcagtttgtccatataatgcatcagaatatggatgcatgcattcgggtcttcgccgtctacaatagcttcgtgtgagaagcgtgagtaggtttcggaaagcagatgaatgtgattgcggagaatgtgaacacagtcgtttttctcggctttgccccggacgatatcttctgccagggcacggcatgacggggcaccgcaggaaccgcagtcaagtcccggaaattcattgcagagttcttcgatttgtttcatcttggtgatgctctcaagcatggtatcaccaatcctgaaaaccggttcatattcaaccgttgtatgccatccaagctccactttctggggaatatcttcgctgtgggttctggccaccggaagatatttgttcagacgtttgatcttggctttggcaacataaggattctctacattgagaacaccgccgacacagccaccgctgcaggcattgagctcaataaactgcagttttgcaaacttctcatcttccaggtcttccagaacacgaatgacattctcaatgccatcggcggccagatagctgtctgtgatcatgccgccggcctcaccgccgctgcagccccagccaatgccgattctgccggaaatcgccagatccatgggatgctgttcggcaatcttcatatgtggcagtaaaaggggatagacatctttgacggccagaacaccgtttacttcactgcgggttgttcccagtggggatttgacataggtgacctttgatggacatggtgaaataaaaataatgccgattttgtcagcaggcaggcccgtcttggccatagctcgttttctggcaagggtagctgccacttcaatgggagggagaatcggcagtagatggtcaatgaggttcggaaaacggactctgatcagacgaacaacagatgggcaggctgtgctgataaatggccattgatcttggtgttcatctacatacttccttgaggcttccgagacaagttctgctgcggcaccgacttcatagacatcatcaaaaccaaggtagatgagggctgtcagcagaatattgacatcatccaggttattgaactgcgcatacagagaaggtgcaggaagagcaaccgtgtatgcgtagttgttgagtatatccagagaatcgatatgtattttctttgcgtgatggctgcaggtacggacacattcaccgcagtcaatacagaactggctggtgatgcgggctttgccgttgcggacgcggatggcctgggtcggacagcgtttgatacaattgatacagcctttgcagaggctttcgtcaaggtatacagaatgaaagaattttttgttcattctatcaccttcctttcagttacatattagcagattcggacagtcatagttacagtggtgccgacacccagttttgtttctatcttcatgtcatcggagtatttcttcatattaggcaatcccatgccggcaccgaatccaagggagcggatattgtcaggagctgtcgagtagccggcctgcatggccttgtcaatatcaggtatacccgggcctgaatccttcaggatcatggtgacttctgtgggggagatataaaccgtgataatgccgccattggcatggatcaccatattgatctcaccttcgtacatggcaatggatacctttctgacgacatcaggggaaacgcccagctgcttgagcatattcttgaggtcactgctggcttcaccggcgcgagtgaaatcttcgccagagaccgtatattctaactttatcgtatcgttcaccttaagcacctccgaccagtccggccttgtagagtatgccacacgccgtaaacatcgtatgcggtgtggcaagcaggcagatgccacgctcacgggccagttcgatcatcttctcatccggccgcttacctcgtacaaaaaccagacacataatatccatcatctcagcggtgcggataacctgcgggttgcacaggcctgtcagcagcaccggctgatcttttacaaaggccaaaacatcgctcatcatatctgaaccgcatccggaatggatttcgcgtatatcaatatcatctgatccgtaaatcagttcagcatccagcaatgggatgagatctcttacaagcatgaaaattcctcctgtctgtttctccgtgcaggcttccaactgctttgcacagcgggcgacaggtgtaaacgctgtctggctgttgtattgcggagaagggataatattattcgtaaacagtatagcatgggtggtgtacgatttcaacaaaaagtgctaaaatatatgtgggttaaattagcgagaatgacggcgtgtatttgtataaaaacaaaaatttaacaaacgttgttaaaaacttactaaactctgcggtaaaaataggttgattattatgaaaaatagtgatatgctgtcataagaaagcaaattcatgtcttttagcaggacaatcgacctgtaatattatgagaaaaaagaaggagggattcttttggcttcaaataagaaaacagtacctttttatggtacagaagagcagaaagaacaattgctgaaagtcatccaggaactcagagatgagaagggatgtctgatgccgatcatgcagaaagcgcaggagatttacggctaccttccgattgaggttcagaaaatcatttctgatgaattgaatgtacctcttgagaagatttatggtgttgccacattctattcatggttcaacctgaatccgaagggcaagtatgagatttccgtctgtcttggtactgcatgttatgttaagggttccggagatatttacaataagctcatggagaagcttgatattgcaggcggtgagtgtacaccggatggtaagttttcactggatgcctgtcgttgcgtcggcgcctgtggtcttgcaccggttatgatggtgaatggtgaagtgtacggtcgattgactgtagacgatattgatggtgtattggagaagtataactagtcatgatgcctgagattgcgttgaatgtattggatattgcccagaattccgtgagagcggaagcatcactgatacagatttcagtggatgtggatgaagcagcggatacgttgaccattactatagaagataatggttgcggtatgacgacagaacagacggcccgtgtgacggacccgttctttacaacccgcacaacccgcaagatcggtctgggggttccgtttttcaagatggctgccgaaagtacgggaggcagtttttctattcagtctgagcccggtgtcgggacgaaggtcacagcggtattcggtttatcccatattgacaggatgccccttggtgatatgaatggaacgatttataccttgatcacattcaacacacagatagattttttatatacatatacgttcaatcagcgttcctttacgctggatacaagagaatttaagaatattttggagggtgtgccgctgaataaccctgaggtatcagagtatattcgtcaatttcttaacgaaaacagtcatgaagttgacggcggcgcagttgtatagaatgaggaggagacagcatgaaatcacttgcagaattgaaagccattcgtgacagaatgcagggtgaggtcaatatgagagaggatgataattctcatcatattcgtgtggttgtcggtatggcaacatgtggtattgccagcggcgcaagaccagtgcttaataagttagctgaagatgttcaggctaagcatctggacaatgttattgttacacagacaggttgtattggattatgtcagtatgaaccgattgtagaagtttatgaacctggcaaagagaaagtgacttatattaagatgacaccggagaaggctgatgaagtggtagaacagcatctgatccgtggtcaggttcttggtaaatatacattaagcgcaacaaatttataggaggtagacagctatgtatcgttcccatgtattagtttgcggcggcaccggatgtacatcctccggaagtgagacgctgatcagccttcttcaggaagaactgaagaagaacggcttagagaatgaagtagccattgttaagaccggatgtcatggtttatgtgcacagggtcctgttatggttatttatcctgatgcaacattttactcaatggtgaaaccggaagatattcctgagatcgtcagtgagcatctgttaaaaggtcgtgttgttacacgtttattatatgtagaggacggcggcaaggccaaagccctgaaagatacagatttctatcgtctgcagcacagagttgcccttagaaactgcggtatcatcaatcctgagagtatcgatgaatacattggtacaggcggttatgaagcccttggccgtgtactgaccgagatgagcccggatgatgttattgagacaattcttgccagtggtttaagaggccgtggcggtgccggattcccgaccggtatgaaatggaaatttgcttcaggcaacagaggcaacgttcagaaatatgtctgttgtaatgcggatgaaggtgacccgggtgcattcatggatcgttctgttcttgaaggtgacccgcatgttgttctggaagcaatggctattgcaggttatgcaattggtgcttcccagggttatatctatgtccgtgctgagtacccgattgctgttgaacgtctgaatattgccatcaaacaggcaagagaatatggtctgttaggcaagaacattttcgattcaggatttgattttgatattgatctcagacttggtgcaggtgctttcgtctgtggtgaggaaacagcccttatgacatccatcgaaggcaacagaggcgaaccaagaccaagaccgccattcccggctgttaaaggtcttttcgcaagcccgactatcctgaacaatgttgagacttatgcgaatattccacagatcatcctgaatggtgctgaatggtttgcttccatgggtacagagaagtccaaaggtacaaaggtattcgctgtcaatggtaagatcaacaatacaggtcttgtagaagttcctatgggtacgacacttcgtactatcatcgaggatatcggtggcggtattccaaacggcaagaagtttaaggctgctcagacaggcggaccttccggcggttgtattcctgcagaacatatggatattccaatcgattacgacaatctgatcagcatcggttccatgatgggttccggcggtctgatcgttatggatgaagatacttgtatggtagatattgccaagttcttcctggagttcacggtagatgaatcctgcggtaagtgtacaccttgccgtgtcggtacaaaacgtctgtatgagatgcttgataagattacaaagggtgaaggtactctggaagatcttgacaagatggaagaactctgctactacatcaaagataatgcattatgcggtctgggccagacagcaccaaaccctgttctgtccacacttcgttatttcagagatgagtatattgctcatatcgtagacaagaaatgtcctgccggcgtttgcaaggctctgctgtcctacaagattgatgcagataaatgtaaaggctgtacattatgtgcaagaaattgtccgaatggtgcaatttcaggcaaactcaaagagcctcatgttatcgatcagtctaagtgtctgaagtgcggtgcttgtatggaaaaatgccgctttggcgcaatctacaaagagtaatggaggagcagacaatggaaaatattacaatcaaaatcaatggtgttgaagtcagtgcaccagcaggctctaccattttggaggctgccagactggcacatattgacatccctacactttgctatttaaaagaaatcaatgaaatcggcgcatgccgtatgtgtattgtagaagtaaaaggtgcaagatcccttgttgcttcctgtgtatatccgatcaatccgggtatggaagtctggaccaacacaccgaaggttatcgaatcacgtaaaaagacattggaactgcttctttccaaccacaagaaagaatgcttaagctgtgtcagaagcggaaactgtgagttgcagcagttatgtaaggaactgggtgttgaagatcagaactattatgatggtgagatgacaccggcgatgattgatacatccgctgcacatatggttcgtgataacagcaaatgtatcctttgccgtcgatgcagtgctgtctgtgagaaggttcagggtatcggcgtcatcggtccgaatgagcgtggttttaagagttatatcggtacagcattcaacatggatttggctgatacaagctgtgtatcctgtggtcagtgcattgctgtctgtccgacaggtgctttatatgagaaagacaacacagacgaaatctttgcagcaattgcagatcctgataaatatgttgttgttcagacagcaccaagtgtacgtgcaggtcttggagaagaattcggttatccgatgggtacagatgtagaaggcaagatggttgcagcactgcgtcgtcttggtttcgataaagtttttgatacagattttgcagctgacttaaccatcatggaagaagcacatgaattccttgacagagttcaaaatggcggcaaactgcctctgatcacatcctgttcaccaggctggatcaaatactgtgaacattatttccctgatatgacagagaacctttcaagctgcaagtctccacagcagatgttcggagcaacattaaagacctattttgctgagaagatgggcattgatcctaagaagatcgtcagcgtcagcgtgatgccatgtacagctaagaagttcgaaatcggcagagatgacgaagatgcagctggtgttcctgatgtagatatcgcaatcacaacacgtgagctggctcgtatgatcaagaaagtcggcttgatgttcaatgaactgccggatgaacagtttgataatccgatgggtgaatccacaggtgcagctgttatcttcggtgcaacaggcggcgttatggaagctgctttaagaactgcagttgaaacactgacaggcgaagaactgaagaatgtagaattccaggaagttcgtggtacagaaggcattaaagaagcaacatacaatgttgcaggcatggatatcaacgttgcagttgcatccggactcggcaatgcaagaaagcttcttgataaggtgaaatccggcgaagcaaactaccacttcattgagatcatgggatgccctggcggttgtgtcaatggcggcggtcagcctcaggtacgcggcagcgttcgtaactttacagatgtacgtgcaatccgtgcaaaggctctgtatgagaacgatgcggctaaaacaattcgtaagtctcatgagaatccggctatccagcagctctacaaagagtactttggcgaaccgggaagccataaggctcatgaagtactgcatacaacatatgtaaaacgagttatcaataaataatcaatagaaaaatcgctcatgatagttttacgccagcatcaaactattgtgggcgattttttatgatagtatttgataattggttatgatataataataaaaagattttatggaaaaggcattacaaggaggtgcgtgatgactatattaagacagagcgcgatgcgcgaattggaaagactgccggaagataaaataacatttgttcttcagattatgcggggaattaatggattaggtgaggatgaacgtctagctaaaaagaatgctttcaagaggctagaacatttgcggaagaaagcagatataaatgaagatttttctgattttgaagattgtcttcaaatggaatgtgccagggattatggggcgaaatatattgtaacgcgcaatattgcggattatgagaaatcagaaattaaggctatttcaccttctgattttttgaaaggggagcttatgcactaatgtgcaaagctcctttttatgatgtaaggattttaagcgtaaagcagccgatcacgctgttgtccgaaaagccttgttacgatgcccagtactgtgcctaccagaactgccgcaatgacggtgccgatgcccacactgccgggactgtgaatagtgatcaggcaggtgataatggaaatcaggaccatggtgcagtcaaaacgaatcttgaccttggaaaaatccattccggtaatctgggatacggcctgcatggcaccttcgcctgccagcggcatcagattaggcggcagatagaagaagattcccacagcgatgaaaaccgtactgatgagcatcataatgattcggatcagaatattttccggtgtcggcaaaaaagataccaggtagttgcagaaggtcgtaaagtaaccgaaaaccacaccgacagcaatctgcagcaggttgatcggtttaaaatttcgacgcagaaggataatctggatcagaactagaatggtgtgaaacaaaattgttgccttgcccatttcaatgccccagacacaggtcatggtataaggaatggagctaacaggggatacgcccaggttggatttgactgaaatagcaataccgatggtcatgagaaaaagtccgacaaaatacatgggtattctgacttttaaattattgtttttctttgcaaggtctttattcatttgatttatcctcttttcctttgtaattcagcatcgtattgtaaatgcggctgagatattctatcagctgttctttatcagcttcagaaaaattctgaagcgcataagattcaatggtatcaaattcattttcaaggcggcccacatagaggcggcctgtctcagtcaaataaacattataaaagcggtgattgtcgggacagagtcgacgttcaatcagccctttagtctccataccgtttaaaatagcagtgagagaagccggttcaatatgacatccggcggcaatatctttctgcacagcaccgttatgattcttcagataatccagaactttgggctgcccggaggtcagaccggtgtctttgacgctggtcacaagtgccttctgaatcataaaatggttggccatgagtaaatagtgaagagattctttcatgaaaaatgctccttttatgtagattaagaatttatagatagaaaacgaatgattagaaatctaactaatagtataagagaaatattggtggctgtcaagggcagaggaataattaaaaataataaaagcgctgttggcagtacagcgcttttattattaaaaagaggaaagtttatgaaaaagatttataaacgaaaactttgtcgtttccttttcgtttatgtctatactataccattcgcttgtgaccaaattgtgtcgaagttctgaataaaaagtgaagaatggacacaaatcgttatggaaatgtaattgttgaaggggatgcatggatctatatcgaagattatgccattgaaggcatggaaaaggaagttcagccggatttgaacaaaacctataagttggcccttcagcttttcaatacaactgctttttcatggtcaccggatatcattgatgtggccaatgcccatactattggtgagaactttacaccatcctttattccgccgcatacaagaatcaacagaggtgatattattcgtctggacggcggtaatgttatcgaacagggaccgccggaggaaatatttgtttccccaacccaggagagaacgcgacagttccttagccgttatttaccggaatttacttataatatttaaaatgctatgaaatgcaaagaaatctattttgcagttgacagaatatggaaattatataaaaatagaagaagaaaagggggattttattatgggtgaagaaaagagaacgttaagctgtacggactgtggcgtgctgaattgtcataagcgcaatgcatcgtatccggagttctgtttgacagaaaagctgacagacgaagacatcgcagaaacgacagcactctatgaggatgaagaaaatcgaaaggtatcagtgatctcggcggagattgagggcgaattctatggcaagtatacacgtgttgatgaaatcattgaatttgcaaagcgaatggggtacaagaagattggcattgcaacatgtgtcggtctgattgaggagagcaggatttttgcaagaattcttcggaagaatggctttgatgtatacagtgcagtctgtaaggtgggttcttttaataaaacagatatcggtctggatgagaagtatacatgtgtgacaggcaatgtgatgtgtaacccgatcctgcaggcgaagcttctgaacaaagcaggcacagatctgaatgtagttattggcctttgtgtaggacatgacagtctgttttataagtattcagaagcgctgtcaacaacgctggttacaaaggaccgtgtgctcgcacataatccggttggcgcattgtatcaggttaaagcgtactataagcgattactggatgattaaggaaaactgagaatgaaaaaggacgcctccgtccggcgatgtcattaaaaggaagatgacattcgcctggtaggggcgtcttttttgatgaatgcaatttggatcaatcagcagtttttctggattcttgcggtcatgaactgctcgaattcttcggctgttcccttagtgaagccgtttttgtccatgacgacgtagctgttctcgtagcggagcagaaagtagtgggaccaggtttcgatgccggtaaattggaagaggcggtactcgccgtggctcttgcctgcagactggtacatgacattcttgtaaactttcattttgcggggaatcagaaggctttcactgtaggtgttctgcctggctttgatctgattcttcggcatgttctggtagtagctgtagaaggaatagatgcagacagcgatcagtgcgatggtacacagcagagtcagcatctgatgcgtgagaatgcccagacgtccgaaataaacagcagccagtgcagccagaatacctaccagcagagtcatcacatgatactgtttcgccttctcaggacgtttataatccttctcaataatatgatggatgatgtcttcatccaattgtgtgtgattttcaaaaagcaattccattgccataataaaagcctccgtaaaaaaatgtagattcatacagcaattccgcacagcctgaagtacttgaggtggaaagtgtaaggagttgctgacagattaataataattatatcatgaaaatggaaaaggaaaaagatatcagctggcttttttagtgcaaccggcgtcagtctatgatacaatgtttttatacggcaaatactgttggtgaagttgttcatgttgtggcgggaggatttttatgaaggttattgattttaagaatgcaagctgtaagcattgctataaatgtgttcgttcgtgttctgtcaaggcgattaaggtcaaagatgcacaggcaacgattatggatgatcattgtgtcctttgcggcacatgtctggaagtctgtccgcagaatgccaagacctttgtcagtgatctggagaaagtcaaggcattcattacaatgggagagaaaacgattgtgtcactggcaccggcctatctcggtatctttgattatgacaagccggggcaggttgtggatgcgcttttgaggcttggattttctgaagtgcgggagacggcagagggggcagcctatgtgacggaggcttataccaggctcctggcagaggggcagatgaagaatatcatttccacatgctgtccaagtgtgaatgaattggtagagaagtattatccggagctggtggaatatatggcaccggttgtatctccgatgattgcccatggcaaactgatcaaatctatgtacgggccggatgtgaaggttgtatttgtgggcccttgtattgccaagaagcaggaagcagagggggatgaccggacaactggttttgtggatgcggttctgaattttgaagagattgaatcatggctgcaggagcgtgatatctccatcagagaatgtgaagagaagcagccgaccaatccggatccgaaggtcaatcgcctgtatccggtgaccagcggagtcatttcatctgttctggcgaagaaaaaggtggattcatacaagaaaatttttgtagacggtattgaggattgccgtgaagtttttgaagatatgaaaaaagggctgatcgagaactgttttattgaggccaatatgtgtgagggcggctgtgtgaaaggacctgccgtgaataaattgcatatttccaagtacaaggcaaccatggtgatcgaggaacaggttgagaagcaagatccggcatatccgcagctggcagggaacattgatatcaacaagcatttcagatcggagaggattcaggatgaaatgccgacagaggaacagattacacggattctcaaggcaaccggcaaatacaataagacacaggagttgaactgcggtgcctgcggttatccgacatgccgggacaaagccattgccgtttttcagggcaaggcagaacaggagatgtgtctgccgcatgtgtatgagaaggcgcgttccatgtccaatgtggtgctggaagctacacctgaaatcattttgatcgtagattcggctttccagatcattgagtttaataagcgggcagaggatgtttttggtatcaacaaatcagaggctgtcaataagatgatctttgagattatggatgcttccgattttgaacaggttctggaggatcacctgtccatcaaacgcaagaagatccatctcagcggtctgggacttgttctgttggagaatattatctatattgaggaaatggatgctatgctggctattttccaggatgttaccgatgaggaagcggaaatggaacggcagcttcaaatgcggatggatacggtggatattgcgcagcaggttattgataagcagatgacggtagcgcaggaaattgccggattacttggtgagacaaccgctgagacgaaggtgattttgacccagttgagagattctatgatgaaggaagcagatcagactgatagtcgtcggaggaagatagaatggaagtaagtgttgaaacatgctggaaaagtctgaataagatacatgaggaactgtgcggcgacaaagtggagatccttaagacagaagattcggatgtggtcattctggcagacggtatgggaagcggtgtaaaggccaatattctggcaacgctgacatctaagatcctccgcacgatgtttcagaaaggagcacctatcgagcagggggttgagacgatcgcacgaacgctgccgatttgccaggtgcgtcaggtggcttattccaccttcagtattttgcagatttttcataatggggaagcttatcttgtggaatatgacaatccgggatgtatttttgtccgagacggcaaattgatggatatcccttatacagtcagggagattgaaggcaagaagattagagaataccgttttcaggtcaaattgaaagactgttttgtcctgatgagcgacggcgtgatctatgccggtgtcggagaactgctgaatttcggctggacgtgggaaagcatggcggactacaccgtgaaatgtaccagggatacactttcggccaagcgtctggcagcgatgctgtcccaggcctgcgacgacctgtatatgcagaaaccgggagacgatacaacagtggcggtagcaagagtcattgagcgaaaagtggtcaatatctttacgggcccgccgaaggatatggatgatgatgagcggatcatgcttgatttcattacaagtccgggcaaacatatcgtatccggcggaacaacagccagcattgcttcaagatatctgaagcagcctgtgaccaacaactacgacggcacaccggaagtaccgccgacatctaatatcaaaggtatcgatcttgttacagaaggtgttttgactatgaacagaactctttaccttctgcgcgaactggccaaagacgatgtggattttgacattttccttcagctggacgaagacaatggtgcggcgaagctggccaagatcatatcagaagaatgcacagatctgaatttatttgtgggcaaagccaacaacacagcccatgaaacgctgctctttgatgtcagcgtccggcataaccttgtcgagcagctcaaagaagcagcagaaaagcttggcaaaaacgtcaccatacggtattattaaagcagacactaaaatgccgcatttacgacaggagggatgcaggtgtatacctattcgatgacacaatggctggcatttttcttcatctattgtttctttgggtggtgttttgaatcggtatatgtttcagttcatgaacacagatgggtcaatcgaggatttatgacaggcccctatattccactgtacggatcaggcgcggttctgatgctttttctcacgataccggtaagaggtaattatctgttgatgtatattgtgggtgccatcggagcaacggtgcttgaatacataacaggaacagtgatggagaacctttttggggtccgttattgggattatacagacaagaagttcaatttccgcggcagaatctgtcttgaagcgacagttctgtggggattttttacccttgtcatggtggaagtgattcagccgccggtcgagcatatggtgatgatgatcaatgacagagtgttgtattatatgacctgggggatcacggttgtatttacatttgattttgcatcatccttcagaacagccatcgacctgaaagaagtgcttatccaggcagagcgcgccaaagaagaagttcagcgtatgcagaaacgagttgaagtacttgaagctgtggtgaatgattcacttgaaagtgcgaaggatggaatggaagtccgctgggatgaacagaagcagagaatggcacttttgacagaagagagaatgacagagcttgcgagacatatggatgcccttcgtaagcgcctggagaactcagagagtatcgaaagaatccgtgaagcggtggaaacatcgggagccggtgagaagcttgaagatattcagaatgaaatgcgtcagatgcgcggcagaattgaggcgatgagaatgcgtgcacgcacaaagatgcatccgagacagctgcatatgatgcttcgaaatccttctgcaagatctttcaagtaccaggaaggctggcggtatctgaagaataagatgtcccgcggtgaggacaatgaaaagaaataaatgcgcaggaatctctttgtgcgtattgaaagaaaaaataaagtgatcgatggaggttgacaaatgaaaattgcattatgtcagacaacagttcataaggattggcataagaatctcagaaatgcagagcgcgtgatcgcagatgctgtcaagtccaaagcagatatggttgttctgcctgagatgtttatctgtccatacaacaagaaagctatttcggcagcggcccagccggaaggcggggaagcatggcaggcgatgtcagaggcggctgcaaagaatcatgtttatcttgtggcgggaagtataccggagagcgcggatggacatatttacagtacagcctatacttttgacagagaaggcagacagattggcaagtatcgcaagatgcatatgtttgatattgatgtggaaggtggacagtattacagtgagtccagcgtcattacggccggagatgaagtgtgtgttgtcgaaacagaatttggcccgattggtgtagctatctgctatgatgtgagatttcctgagttgttccggcttcttgcgaagcgaggggcaaaggcggttgttatgccggcatccttcaacagaacaacaggaccggcacattgggagctgctgatgcgggcacgtgcccttgatcaggagatgtacgttcttggatgtgcggcagcaggtgacctggcaggctcttataacggatggggacattccattgcggtggatccatggggatcgatcatggaggaactgggcgagggtccgggcatgctgatggctgcagtagacttcgcaaaggaggatgcagtacgcagtcagatccctgttttgcagcagttaaggaccgatatttatgaagtttgtgaaaagactgtcggataaacagaaaaagccttgacaaaagggccagaaacgtatataaatagatttgtcaacattgaagcgtatggccgaaagagcggtaaatgcaagggtttccgccggtttcatttgcagaagatgactgcgtacgcttatgataattgaggaggaattataatgaataaagcagaattagttgcagcaatggctgagaaaacaggcatgaagaagaatgatgctgaaaaagctttaaaggcatttgtagatgttgttacagacgaacttgtaaaaggtgagaagattcagcttgtaggctttggtacatttgaagtgtctgaaagacctgaaagagaaggaagaaatcctagaacaggtgagacaatgaagatcgctgcttctaaagcgcctaaattcaaagcaggtaaggcattaaaggatatgatcaacgcctaatcgaagataacacaagaaggattcccgctcagcatttatctggtgaaagggaatccttttctttttgtaaaggagaaataaaatgagacttgataaatatttaaaggtttccagactgatcaagagaaggacggtagctaatgaagcctgcgatgccggtcgtgtgatgattaacggcaaaacagcgaaggcaggtacagatgtgaaagtcggcgatatgattgaaatcggatttggtacaagaaatgtcaaggtagaagtattggatgtacaggaaacaacccgaaaagaggatgcgaaagagctgttccgttatttataaaaaaggtcatgaaacggcaggctgtctcatatactaggagcaatagcagatgctggcggtgaagtctatgtatatggaagaacagcctgtggtgaagcctcacagactgacaatgcagaaccggtcgacgattcaggtgacgggggtttcggatgtgatcgcctatgatcccggagagatcattcttgagacatcagcgggccttttgctgatcaaaggggcggaacttcacatgaatcatttgtcccttgaaaaaggagagaccggggtagacggcagagtggatagtttgacatattccgaagccaatggcggtgcaaggcaggccggaagctttttcgggcggctttttaaataaccatgagtcaggatgtggtgtttcaggcaaggctttttggaatggctgtcctgtggggttcgggattgatgctggcttatgattgcctgcggatgctcagaatgatgatcaggcagcgtaaaggcatacaggcggcagaagaagctgtattctggctgctggcggccggctgtctttttgggttgctttaccgttttaataacggtgcagtacgcaattatattatatgcggaatggggacaggcatggtgctctacagatggctgctgtcatccatggttgttcgttggatgctggcggtattgcgcccgataagacaaatagttcgaatttttaaaacttttgtgaagaatgcaggaaatacattgcaatctgccgctgcaaagcgtacaattaaaggtagaaagttacaacaaagacagggggagcatgatgacagctaacaggcggtctgtcagaaaacgcagatcgaagcataaaggcagtatgaagatcattacgttgatcgtgctggtgttatgcggagtgtttggcgtttttacatggcagaatacacagaagagtgaacagtatgctttagtacaggagaatctgcagcagcagattgacgatgaagaagagaaccagaaagcgattgaagagcaggctgaataccagaagacagatgcttatattgaggatctggccagggagaagctgggattggttcatgaagatgagattattttcaagaagaagtaatagagaatagaacgacagaggaatcaaaatggctgatttattatattatgttgtagagaaaatggccgggattcatgatgtgcttatgacgttgaatgattcttatgagacgatgttttctgataaggaattgcattttattgtcattggtgtgctgggaatggcattgctttttgtcatttttccgctgttcaaagcgctcagcaggcatcatgttctggtgattgcatggatttatgtatttacggtcatgatcgttgtgacctttgcaatagagatcggtcagggcatcacgaataccgggaagatggaaatggaagatatcgtaagcggtctggctggatttatgttcctgtttatcatatttgcggtgctgagggcgattgttcttggcattgtacatctggtcagaggtattatgggccgggatgatgacgacgatgacgatgatgatgaatagaaaacagacggataggagatgagactcttatccgtctgtttttgtgttataggtatgaaatatcagcaatgcgccgattgctgtggggttatttagatttctgtgctgaaacgggtataatcagcttccgtctgaggcatgacgctgccgccgtaagggatgatgtaaacatctttgcctttgatatcaacatcagccatgatatcttccatgcggtcatattttctgatgcccatatcgttgacgatccgggcatccagcttaggaccggccagcagaagaatattggccttgcggatattttcacaggcagcatagaaaatatagccggcgatcgtaaaggcttcacgaagactctgatcaagatggccctctctcagcggtgtcagccagtcaaagaaatctttggcaccggcgccttcgctgcattcagccagcatgacgagtgttccgccgggtttgacggcacgaacggcattaaagagactcttggaaccctgatagaagttcagatcctttggaaagccgccgcagctgacaaagacaacatctgcctgatctttgatcggaagaccgtaacattgctggacatacttgcagctttcccgccatgcagcatcgaagtcaccgcaaaaaagaccgctgtgtctggaggcggagttgacaacaatattgatgccgaagaccggatgaagcagtgcacctgcttcgcgcatgtcttcattgatcgggttattgttgaatttgccgggaccgactctcggatcactttgctcgcagtgaggatccagggccatggcatggttgtgccggatagtttcacggccggcaataccgggaacgatgctctttctgccgccgccgtaaccggccatcagatgatgaacagtgccgccgatgcagatgaccttgcggccgatggacagcggattgatcaggactctggttccataagaggttgtgccgatatcgacaagatccggggcatcacagtcgtggtccacaacagcggcaacatggtcatagacataagcacctgtcagcaccttctggtcggcaggtgtatttttgtgatgggtaccgaggccgatcaggacgactatgtgttcaaaaggaataccgatgacttcattcagataacgaaccagttcctcacagatgatatcctggcgcatccagaagcgggtcatatcgctgatcacaatggtgatttggtcttcagggctcaccagctgatcaagtgccggtgattcgatgacatctgtgctgattgctttgagaaaagctgcatgaatgtcttcaattgtgttcatagggttctctgtcagcgtctgaatgctgcgggcaccatcaagaacaaaagatacttcgcttttaccatactttaaagaaaaatttttcatcatttaatctactttcttaaatcactgtctttgttaatagcggattttcttaatgcagatttgccgtttccatcgaagcggcggctgcatcgttatgaatagttacatactaacactttaaagctgcatagtcaatgacggacatgaggaccttaaaaaaccctcgaaaaaacatttgaagggaggtcttgtcatccgattggaatcgtaagtgtctcgtttttccatataatgcatgtaacagatccatgaagcggcaaaatgcggatctgtacaaaattcaggaggcatgtgcatgagaaagcttggcatgaaagatttattggtgatcgtccttggtgcgttcatcaatctgtttgtctggcacgacagaaacccggtgggtgttgcgtttttctgcgcggcatacgccctgatcccggggaaaatgctgttggcgatggctgccctgttcgggatggcctatgcactaccgatgacttcttttataagatatacaggattgataacgacggtgatggccatggcagctgttttgaaaaaatggcggccggccgggctgacaccggtggttatgtgtggtctgatggtgttgacgatggtgacagccggcgtaggttatggcctggcttacggggaaggctggcagcagcatatgttggacacactgccggaatcggcattggaactggcagcggcatttgtgtgttactggctgtttgcaggcatgatcgcctggatgaagggctggcgtcctgtaggaaggaggaatatgccgatgaaagaagaagcgatgatcaccaaaaatcagctgcatgctttttcggaatctttcagaaaattatcccagtcctttgaggtagatgtcagtccccgcggcgctttaaatgatcaggagatgcaggatatttttaatgccgtaacagagcaggtatgcaaagactgcagccggtgcagttattgttgggaaaatgtatttgaggacagctgtgaatcggcctatgagattttgaaattgtgcagtgagcgcgtgaatatgaagaaaaaggatttgccggaacgcttcaggcagcgatgtgtccgatcagataatttcctggcggaagcccgaagaatgatggggctggcgcagacgaatctgtcctggcagaaccgcctggcagaaagcagattggcactggcgggccagttcggggaagtggcagatgtcataggggatttttcaaaacagatcagtgatgaacctgtcagaaaaggggcaccggaaaaacaggcggtgcaccggctggcggctcagaaaatcaatgtgcgcagaatcgcagcgtctgaccgttcaaatggtcgcaaatgcgtttatatagaggcaaagacaccaaaaaatattgaaaaaacagcgcaggaggcggcagatatcatcggaagggtctatgggcggcggtatctgccgcgaccgggaacggcatcggttatcgggcatcgatgggaaatgctgtcttttgaggaagatgtccgctatcggaccattatcggtgatgccaggatggtccggatgggggaagctgtttcaggggacagttttacggtgatgcatatggaaagcggccagactgtgctgtccttatccgatggtatgggaagcggtgagaaggcagaaaaggagagcaaccgcattattgggcttttggaacagctgctgtctaccggatttaaccgtcagtctgctatcagactgattcattcagtggtgttatccggcagtgaaccgcacacctattcaacgctggatctggctaccctggatttatttaatggaaaatgtgaactgatcaagatgggggcggcggcctcctttattaaaaatggtccggatgtgaaaaaaatcacctcggaggcgctgcctccgggggtgcttccggaaccggaaaatgaagtcaagacggtggaaatggtccacggtgatatgcttgttatgatgagtgacggtgtattgatgggacttggacaggatgatgaccggaatgaagaaaagatggcagagtttttgaaatcctgtcaggcggtgaatccgcaggaactggccaatgccattttgaatcatgcgatggcagcctgccattatgaggcagaggatgatatgacggtacttgtctgtggtctttaccgcaaaccgaagttgtaatatgaggcatgtgttttgagcaatgtgtaggaaatgtgttgaatgcagtgtgggtggcggattgaaatggagggggttgacggaatatgttatactcaaaatacagagtattcggactttgtaagggctatatgcagcaatcaggtaaagactgaaagtataagttgatgagctgccggaatggagtaaaatgaaagaaaaggaaacgggtgatgaaagtggacaaactggtcaaaaatgtatatgagacaatcatggcatcagggatgatctgtcagggagattcggtggtggtcggcgtttcaggcggggcggattctgtctgcctgctgtctgtgttgaaaaacctgcagatgtccatggcacttcaattgacggctgtccatattcatcatggcctgcggggagaggcagcggatcgtgacagggattttgtaacggcactttgcgaagatatgcagattccgtgtgtgtgttttcaggcagatattcgggcaatggcgagggagcagcatttatcggaggaagaggccggaagaaaataccgctatgactgttttgaagaagtcagacaggaaaggcaggcatctaaaatcgcagtggctcatcacagggatgatctggcagagacagtgctgctgaatcttttcaggggaagtggcctgaaaggattatccggtattccgatgatgcgcggctgtattgttcggcctctgcttggtgtcggacgggcggatatagaagcgtatctcggacggcagggaatgtcttaccggaatgatgccaccaattttgagacagaatataccagaaacagaattcgactggatattctgccctatgtcacagagcatattaatcaggcagcggtttcgcatattgcggagacagcggccattgcatctgatatctgtcgttatgtggagaatcaggcagcagccattggaaaatcgatcattcagtggaacggggaggcggaatgtctgacggcggagattgatgcagctgcatttgtaggacaggatattgcgattcagcgcgaattattgcggcaagtgctggaacggacggccggtcagctgaaagatatccggtctgttcatattgggacgctcagggcactgttttacgggcatgcaggaaaaaaggcagatctgccttacggccttcgtgcggaacgcacctatcggacagtgagcgtctcacagaaaaagacacataaaagtgcagatgccctgcatggggatgacgcggagatcagactgagtgcacccggaaaatatgttttggatggtgggaaaagagaggtttgccttaaaatttttcctgtggagaaaaatctgcaaattcctaaaaaaatgtatacgaaatggtttgattatgataaaataaaaaatggactggttctgcggcagcgccgtcccggtgattttatgatgatcggcggcggacacaagaaggcaattcgacgtattttgatggatgacaaggtgccgcagtcgaaccgagagacattgaacatgttgacagatggcggtcatgtcctgtggataccggatactggccgtatgagcgaatattataagattaccggagagacaaggctgattttatcagcggaactgaaggagattgaagaatgaaagagaagattaaggttttattgccggaagcagaagttgacaagaagattcaggaactgggggaacagatcagcaaggattatgaaggcaagaacattcatatgatctgtgtattaaagggcggtgtgttcttcacatgcgaactggccaagagaatcagcgtacctgtatcccttgactttatgtctgtttccagttatggcaatggtacgacatcatcaggtgccgttcgtattgtcaaggatctggatgagccgctggaaggcaaggatgttctgattgttgaagatattattgactcaggcaatacgctgcattatcttgttgagattctttataagagaagaccaaacagcatcaagatctgtacactgctggacaaaccggaacgccggacagcagatgttaaggtagactattccggattcaacattcctgatgaatttgttgtaggctatggtcttgactatgcgcagaaatacagaaatcttccgtttatcggagttgttgaatttacagaataacagaagataagtcgaacagaagctgaagggggttgctgcgcgtttatgagcagcatccctttttcatcctattcatcctattttttgaggagaattatcaataaagacaaaagagaagtcatgaagtgacaggaggagtgtaacattgaataataagaaaagaggaattggcctctgggtcgttgttcttgtctgtgtattcattgggattattgtcagtgagggatggaacctgctgacaaccagtgattactcgtacagcgatttccagcaggatatacagactaaggcagaacagattgaagatgttgtcatctcaccgaataaggagacaccgacaggtatgatctctgtagagtggaagaacagcagcaaagaggaaagtttttatgtcacagatgtcaatcaggtcaaggaatggcttgaatctgtgaattatacagactacaaagagacagatgtcattaaccgagaaggctggttttacaataacggtgctctgttagtgcttggcggcatttttctgtggttcctgttctcctttatcaacagtcagcaaagcggcggcggaaataaaatgacggatttcggcaagagccatgcgaagatgacaaaggacggcagtcacaatgtaacatttcgtgatgtggcaggtcttcaggaagaaaaagaagatctccaggagatcgttgatttcctgaagtcccctgagaagtatacaaaagtcggcgcacgtattccgaagggggttatccttgtgggacctccgggaacaggtaagacattgctggccaaggcggtagccggtgaagcaggtgtacctttcttcagtatctccggttcggactttgtggaaatgtttgtaggtgtcggtgcatccagagtgcgtgatctttttgaaaatgccaagaagaacgcaccgtgtattgtttttattgatgagatcgatgcggtagcaagaaaacgtggaacaggtctcggcggcggccacgatgaacgtgagcagacactgaatcagctgcttgtagagatggatggttttggtgtcaatgagggcatcattgttatggcagctacaaaccgtgtggatattcttgatccggcaatccttcgtccgggccgtttcgaccgtaaggttggcgttggccgtccggatattcagggacgtcgtgaaatccttgaagtgcatgccaagggcaagccgctgggggatgatgtggatctggatcagattgcccgtacaacagcaggttttacaggtgcagatcttgagaatttgatgaatgaagcagccatttatgcggcaaaacagagtcgtgcatatattgtgcaggatgatattcgccgggcgtttgtcaaagtcggcatcggtgcagaaaagaagagccgtgttatttccgacaaggagaagaagattacggcttatcatgaatccggacatgcgttattattccatctgcttccgaatgtaggaccggtttattccgtatctattattccgacaggtattggtgcagcaggttatacaatgccgctgcctgaaagagacaatatgttcaataccaagggcaagatgatgcaggatattgttgtatctctgggcggacgtgttgcggaagaattgatctttgatgatattacaacgggtgcctcccaggatattaagacggcaacagagacagcacgtgccatggttacagagtacggtatgtctgatgcagttggtctgattaattatacaagcggcagtgatgaggtgttcatcggcagagatatcggccattccaagccatatggtgagggcattgcagctgtgatcgaccaggaagtgaaacgtatcgttgatggctgccatcaggaagccagacgtatcattacagagcatctggatgagctgcatgcatgcgcgaatctgctcattgataaagaaaagataacaagagaagaatttgaggcaatttttccagagaaaacagaaaatgaaaaattgcgctttatgtaacttgcataaaaaggtttggtgaataaataaaactttgtgaacacttttaagtgggggcatggtattataatagacgtaaaccccccaatacattataaagtttttgtttcaccccataaacaaaaataccttctccaaaaggacagcaacggaagctgtccttttttctttgtccaaagagattagataaaaataataggtgaataggtgaaatgaggctaccgcaatcccactggctttagacggtgggttaaggtagccaaaagttagatattattgtatacttatggcatgggaacatggaaatctaaaaacaggcacaaatacttattacaatatcacatgtatcagaaaaaatgcttaaaagatatatagaaaaccaaggttaaggcggtggcagcagatgttaaaagcatataaatacagaatatatcccactaatgagcagaaagaacagatagcaaagacatttggctgcagatgttaaaagcatataaatacagaatatatcccactaatgagcagaaagaacagatagcaaagacatttggctgctgccgttttgtgtataatcggacactggcgtatcgaaaagaagcatatgagaaagagaaaaaaaacgtaaataaaaccaactgcaacaattactgtaaccaggttctaaaaaaagaatatggatggctaaaagaagtagataagtttgcccttacgaatgcaatttataatatggacgctgcctatcaaaaattttttaaagaacatacagggtatccgaagtttaagagtaaacatgacggtcataaatcatacacaacgaattttaccaatgggaatataacggcagattttgacggaggaaaagtaaagctgcctaaactaaaggaagtaaaagcaaaactgcatagaaattttagtttttaaagttgtaattgcactgctaaaaaatgccatatacattcaccaaaactgacttctttcaggtgtttacgggaatgaaaaaacaccgactaaaaagccggcgcacctaatgtcagttattcctttcctcattatttttcgttcattcccaaggttactccgacagctccacctgaattacctccacctcttcttcgggtttcggtgtgtactgcggatttaactctttttctactttgtatcggtttttctcattttcatctgcaagaaaccgataatttttgtgtttcgtgatatcatatttgtctgagaaaaatggtctggcaccacgaatctgcaggatacattttcctccatccatgactgcaatctcatcttctgtcatcagctgtttgcctgttttctggtaattcaatccaaaggacttctgattgctcctcgtttccgaagtgttatacagatcaatggtttccttacccagaagttcactcatttcctttaaggtagttttctcttttccaccaagaaatagtgtagtatcacagttacccagaatggtatctgcactatccttgtacattgcctttagctgactctgtgactgcaaaataatagaagcagagatttccctgcttcggatagttgcaatcagcttgtcaaactgaggaatttgcccgatgttggcaaactcatcagcgatgacacgcacatgcaccggaagtcttccaccatatacatcgtctgccttatcacaaagcagattgaaaagctgtgactgcagcatcgcaatcacaaagttgaaggttgtatctgtatcggacataatcagaaacaaggctgttttcctatccccgatcttatccaattccatttcatcataagacatgatttctcgaagctctgcgatgtcaaatggggcaagtctggccccacacgatatcaaaatacttttcgctgtctttccagccgccattttgtattttttatactgtctgaccgcaaagtgctgcggatctctttcttccagttcctggaacatcatatccactggattctggtaagtttcatcctcttcacgggtttcgctttcattcaaaagatccagaagagtattcaaattcttttcctcttcatccccttcataccagataaaagcaatcagtgcggtgtacagcaatctctctgctttcacccaaaaatcttcggaagctttttccccttcgcctttggtattaacaatgattgttgtaaccagcttcaggatatctttttcagaccgtatataagcaaatggattgtaatgaagggacttggaaaaattgatggtattcagaaccttaatcacatatggctcatgtaccacttttccagatttatctttcatgatatttccattcttatctttcttaggtggtccctttgctaacatcttcccgcactcttcaatcaaagtacctttcggatctgtaatgaccatggaacagttcatctgcatgaccgatggttttacgaaaaaacgtgtcttaccggaaccactgccgccgatgaccactatatttttatttcttgcatacttcggctgcttcggtctgctctccatggtcagtgcttctgttgctgtcaatggaatgttcatccatggatcttccgacatataaggcttgatatcctctgcggttccccatctggctgaaccatactcgatgcctttccgtaatttctttgcatctgactgtttctgccaaaccagcactttcaaaacgactgcaaccgtaatccctgccagcagatctttccagttattgcttaacacaaaaccagcaaaaatccgatctgcgtgttccatagcatataagagtttgttccccatatcttctcccggactattccggtaaagaaaaaatgcccggtctgcatagaacgcagccagagcatatgggagattggtaagaaccagtttctttttatccagggcggacagcttacccccgatcttattcttccacttctgcatcagaggtttgccgatctgtttcttcatcgactctgctcctgatgccggttctttactttgtccttcgtcttctttggcatcattgcccggtaagctgccagacgcttgtgaatcgaaggtttattcgctttttgaatctgtttctgggaaaactcacggaaagcagcattgagggcatcctgatcacgtcctttgaaaaataccagataaactggcggctctttgctcttgtcctttttcagagcatagttaattccatattttctggcatagcgttcaaaggacttgatatttttgttcgtgatctcgatattgaccatcccggcattctgctttgccagctcttttaccgtgacctttccctgtttcggctgatttttctgtgctttcttctctaccgatttctgcttatgatgccgcagatacgcagcaagaacctttctcaacaggtctgctgtgattttggtagtccgaatacagaacgtgaccgttttctgagttacctcttcctgcatgacttttccctcctttcagcgatttaactgctgtccagatctgtaatcatggcaatcaccccctttcaataaaaaaggacagattaaccggtaatcaggctctgtacctgtacgagtttttctgtcccttcttcttttctcttatcttctccaccacaatagatgggaacacacatttcaagtattctgctataaatacgctgatgggcagtatctaaatctgtggatttcatttcattcagtcccagattcgttgttacgatcagcggaagcattttacaatagcggctgtctatcacattatagacctgctccaaagcaaactcagaatttcgttctattcctaaatcatcaataatcagcagcggataatccacaagattttgtataatctggttcttatctgcctgatagctggtcatttcatttaaaatcctggaaaaattcgtcatcatgacacgttctccctgttccaaaagtgcatttgcaatacagcctgcaaagaaacttttcccagttccaactggtcccatcaaaagcaatcctacattttttctcttcatatctgtccagttttctacatactgcctggcaattagtatcttctgattgcttccattgtcattttcaaatttccattcccaaaatcttctttcccgaagtccgatggattttctctgataaagctgccgctgtgcttcttcccgctgcatcttctcatcaagttcctgtctggcttttacctcgcattcacacaaacaggacactacatgctcaaatcccatcagactaactttcatctgttttctttttccacagataccacaatgaagacatccctcttcatccagataatctgctgttactttattttccatcacaggctttctccttcctgaaattcatatttatcccttcctgccctggctccatctcgttctgaccaaagacagattgttgcaaaatgattctgatactcttttccactggatttcatataaacagaaagatgatctatccgtttctggtaatcccatggaaatagcgtcatcaactcctgcagttctgcttccgacagaacaacatttttaaatctcccatttagactgaatttttcttccaaagcgggagtattgcccttactcttatcagtatgattcttttcagtcttatttatcttagtattacttccatccagattcttgcagtccggacttctatttttttgcgttccggacttccagtttcttgcaatccggatttccaattccttgcagtctggatttccagtttctggcgttccagaagcaaagtatcttacgggctttcctctgctccgtttcacaaaatttttcacatatatgacagaaggacgattattcccctgccgataccgttcgatcaatccaatcccatgcacactgtcaagctcataaagaagctttgtcactgtcgtatgcgacattcgcaacagctcctgcaattctgcaatcgtgtaaataatatagacataaccatcaccgtcaatccagccatttttcttggataggctgattcgatcaagcagaattccgtaaaggagttttgcgtctgtggacaggcttgcaaactctttttctgtgaacagagcttttggtatccgaaagaaagaaaactggtcagattcttctgctctgaaatattcaaaatctgccatagcttatttcctattcttcctcattattaaaatcacaccctgctgcactgccagttccatgacacatctcattaaacacaaagttgaagcacatcattaactcactcagataataattccttgcctctttattgcaggcatacatatcctcgatataaacctcctcgtttccattcattcgtgcgattgtttccagaactttcataaacttcttattagagcagcactcatactgctcatttacatatttctgaatttccagcacacgttcaggctttccttcataaacagataacacgccaaatgccagatccatgccaaactcatagctatcggcttctacggcatcaatatcaagattaccttcttcatcgtaatagccacgctcttccataggagtcagtggtgtctcatattcatccagatatcccatatctgcaattgttcccagaatatctctggatgctttcaccatcttatccataataatttctctttcttccatctgcatatttgccataattctgtctaatgtcatcattgattcttcctccatctcattttcataaatatcattgatataaaagtggttcgcctttccatcgttttgaacaatacgcaccagctttccaatcttaacaagttcctgtactgcctgatctacgccatatcgagtcgtattcagatctttcttcatttcgctttttggatagataacaaacagatctccattatgatctacccagccattctgcaccgcaaatttcaaacgatccagaaataagctgtataaaatttttgctgtatttgatagatttttgaattcttccacctggaacagcatctttggcacctgcaaacaatctaccggcatatactccatcttactcattgattatttcctccttctgtttgtacagcacttcggctgaagtaatattgatttccagcatacctacaaatacctgatagtacagcaggcatatctgttcatcctcccttgccagatacaatccttccagttcatcggacggatgtttcattccatataatgcctgacagatatcatggattttctcacattccacacttctcagatgcatctccaaagtgtggttaaatctctgccagtcctccaatttctgatttactgacatcatgcactggaacagttccgctgcttcacatgctgctgacagcactacatttttgttattgatacttccatcggcatttttcatatgccctaccatatacgcctgatctactgaaaccatcttttatcctcctctatctaaacggcatttcctcttccatgccctccggtatctctaaaaacccttccgcatcttctggaaatggtggtctgtcaaccatttttgcacctgcgaattcaatccggtttgcatacacttcagtggtatagatctttttcccggtatccttatcttcataattacctgtgacaatctcgccttccaccatgaccttcgttccctgcatcagataatctctggcaaattctgctttctttgcaaaagcctttaccggaatgaaactgacttcatcggaataattccttctaactgccagaacaaacttggcaatcttatgaagtcctttttcattctccacttcgttgtatccgggatttcttaccaatcgcccggaaataactgttgtattcattggcttaaccctcctatgctttcattgatttgtaacagataccgatacatggtccacattttccataggcacatccgtaacattcatctttttccaactcttcctgcttcatttcatcggcaaacattcctaacagcgttgtgtaaatctttttcattgccaagaacttcacttctgctttttccatcttctctttgtaaaatggaattagtccacgaagaactggatggaaacgttcattttcatcatcccaggcacaggttttcatcatacagcgtggctgtttctcataatttcccagataatacgggcagaacgtacagcctctttctttaacaatttccaccggaatcactggcatctgacttttgatttcttttgttacatgcttactttcaattcgctctctcatcttaaaaatcctccgagtatatatatctgcaaaagggatttcccctgaattgcttgatttttggtacaaaaaaagaggcaagcttacgattttattttcgcaaacctgcctcttatcaaatattcaattattttccgatgatatatcgtaagaaaacatataccgcacggattacatacactggaatcatgatacatccaatcaaagctccaatgatgacacttaatgcagccataccaagcgttgctgtggtatccattcctctagggattagaatcagccgcattttatgtattccaaatggcaatccggcaataaatatccaccagaaccaatccgtctgaccactgactttcataattgtttttgtcatccaaaaccagaataccataaatgccagcggcagaattgattttttaattacgtcttcaatcgtcaccttttttctccttctgtctgattccttccgccacctcccgattaaggtttgccaatatttctctaaccacaggagaatccaatcgaaaggtttccaaatctttctccgtaagctcccttccgttcgcatcatatcttcgtacaatttttaaagccatactttcactttcttcctgctgataatcctaatgttttcaacaaatgttcaaacttctctcttttcatccgtttaacacgtatcttttctatctttttcagataggcttgtattctacttaccgtatcttcattgctcattctttaccctctctttctgcccacgatgccagaagcttaaatataatttcttccatctgagtctttgtatatgtctctggaaaatattgtttcaatttcttcgccggaatctgcacctgaactttttcagtactttcattcatgcaaatctgatcaatctctgaatacgtcaacatccgctcttttgaaatctgtttcaattcctttgcctgcttcatggacggtaccatattgtgattactcatatactgaagtaacacctgttgttcttcatttctcaaatatgaaatttcaacagcagtgttaaagggaagctttttctcgtctgccaattctaatagctttgctattaactctgtcagatgaatatatcgaagaatctgtctggaactatctcctgtattctgactgacttcttctgccgccaacttcttgccaacttggcaagaagttaaatcagagcgttttccctgacgctttaacgcctcatatttcattttataagcaaatgctttttcgctgatcagcagctcttctcgttgaatgttggaatctaccataattaccgtcgcttcatcatccgtaagatctttgatgataaccggcattttctctagtccagcaagttcacatgctcgttttcgccgatgaccagctaccagctcataaccaccggactctctcaaacgcacaataccaggaaccaacacgccatattgtgtaatactttctgctaattcttccattttcttatcatctcttacttgaaacgggtgattcgtaaatggatgaagacttcctattgctatctcactaattccattggttgtctcttcgtttgttccaaacaatgcatcaagcggctgtaaggaaacgggagttgctctttttttagatggcatctttcagcacctcctccgtcactctccgataagcttctgtagctttgcctttcggatcataaaagaaaatactctgtccttctctgactgcttccttcattcttacagaaaatggaatataattatcgaaaatatgaatttgacttccatatacatttctgagaagttccatattattcctggcatcattcgtatgagcatcgaccatcgtaaacagaattccaccgacttgcagcttcggattgatttgcttacggaccttaccgattgtttttaataactgctgcaatcctttgattggcaggtaagacgcttcaaccggaattagtacttcatctgatgcagccagtgcattgattgtgatcattcccaatgatggcatacaatcaatgataattgcatcatattgatccttgataccatataaaatctgtttcaatacatattccctgctcattgcatttaccaactgtacttccgtacctgccagtccaatgttagaacagataatgtctattccttctgcctgatgcctgatataacagtctgaaggaatatcttcatctttcattactgtatccataagagctgtaagtgtttcattactttcatcacaatcacgatatccaaatcctgcagatacatcagactgtggatcggcatcaacgattaacactttcatattcttttgtgctaatcctactgctaaattagctgtacatgcggactttccagttccccctttttggtttacaatagaaataattctagccatttttcatcacctttcatcgtcgtcaatcaaaaagaggactgaattagacaaccggaatctatattccgtgcgagctaattcagtcctataattacaataattctgttgtttttactcttgtcttacacaaatccatttccagtctggatctgtaataattcatattctggaatgacagcgctgtcttatttttccctttttcagggagttaaaaataaggactaaattagtgcaaccccttgtatttactggagttttctaacttgtccttattataactcgaccatgacaactaaaatgtggtaaaagcacttctgggttttctgttttcaaaaactgctcatcgttgcaatcacggattatgcgtcggattgccttattcaaagtcgattgatgttgtggctgtccgaagcgattgagaaatataaaatctgtatatccatctatggtcgcttcgcagtgaacccctagcagttcttgtctttctttttccataacaaatgcttatttaacaaaatcgagcatcggaacttgtctatttcctgcttctgtctttggagtattcacattgaaatagcagcccttttttccttcagaagttctgtggtcataataaaccaacgtgtgattaacatctataatcccatcttccaaatcaatatcacaccatctgagtccagtaacttctccaactcttaaccccgttccaagcattactgcaaacaccggataccaatacactgctgtattagagttcttcagataatccataaacaattcctgctcagtagtaatgtctatcaaaaggcttttacatattagataaaagcatgtaaaatttcttttacatagcttaattgcggtctatttagcttgtttcttgactactcaggaaaaatatttctaccctcgccccacctgtattttcagaatttgaaagtttaatacctccaccatatttttcagccacagtttttgcaaaaaatagtcccatcccataatgggcttcgccatttctacttgtgtcatccataaaaaactgctctgtgccatgcaataatgcttcttttgtaaatcctgatccgctatcctccacaatgaatgtcagccggccatcctgctcctttgcgtcaatataaatgattccattttcttttgtatgctccactgcattctgaatcatattcattacggcccggaacattggatcataagcaatcgttacctttttatcactttgtcccgccttccaatctattttctggtgatagatttctaccagtccgagtgcctgttcctttatatctgcgaaaaaatcttctaacctcaccgttgtataggtaacatcactgcaattccatgattttgtgacatctatcaactgttttacataactttgtatctgtgttgtgccgttcaaaacataagtgatatttttcttctgttctgtggtcagttcagtctctgaaagtagttctgcatttccccgtacaatcgtaagaggtgttttaatatcatgcgccaaagcagacatctgctgtttcttttcctgctctgttttccactgcttttctaaagattctcgcaatgcatctcgcatatcatcgattgccgataaacagtcatcaaactctttgataccggaacaggatgtctcatattccagattttgatcctttatttgtccgattgcgtctaatacaggctgcatctgctttttgattctttttccaaaacgtatggacggaatgatgataatcgctaccgctccaatcacagacataatactcatcacattctgtggttctataaaatgctccctcaaaaaagctgaatgatattgaggtgtcaggcgatattgcaatacaacatattcattttcccttacaattactttataaaaatatttcccggatgcatttccgtactttgcaacattccatgctatctgttcgtattgttctgacaaatctccacctattttctctccattctctgaaaagattacataatcacaaagtgcaggaatcatctcagcagttactttatccgcacgtaaaatcgtatcatatgcttcattaatcttttgctctgcataatttgccggataaatacagcccacactaatcaaaaggcacagcagcagccaagcaacaatcaccaaaccaactaatgatccaagcatgaccagtacatatctcataaaaatcctgctgagtgcattgcttctctttactcttcccatttatatccaatcccccagactgtttttatcggcatataatcataagccgcaaattttgctcttatatttttgatatgcgtgattatagtactgtcattactctcattgtcaaagccaaagaccgcttccaatatctgttccttcgagaaaacctgtcctctgtttttagccagaaattcacagatttcgtactctgctttcgtaaacggaagttctttatcatccatcaacagtttcttttgcgacatctgaatgcagactctccctaaaaccattcggacagaatgttccctgtgctctcttctaagatgtgcattgatccttgctcgaagttccatcactccaaatggctttgaaatataatcatctgctcctaaagaaagtccgtttaccagactgttttcctccgtttttgccgtaagaaacaaaatcggacaatccacaagtgccctgattcttttgcataattcgaagccgtcaattccaggcatcataatgtccagtaaaatcaggtcataacgatgtaattcttccatattaatttttagtggattacttactttggtaaccagatgtccatccttattcaaaatgctttctatcatttccaaaattgccggttcatcatcaactgccagtatttttgccatagtttccctcgattctattccgatattctgtttccttcccagtggtttacccaccaaaaatagtataccatactaatccctgtaaatattaagcaacctggtatgaatgacaaccattcacctacactagtttctcccaatacagattgcagataagtatatggtactctacccgtccagcagacaaatacatatttccacacataatctccaagtccggtaagcatcaatgcactaattagtcctgatataatccctgctccaatggataccccttttccaaactgaaaagccagaatcagctgccacagataaagtggaacactgcttccccacagcagcaatgctgcaactatacatcctttcatgatttcgatatcgcttgatgcgattcttccaaatccaattccgaatatgattgctgtcaataggatagagcacagacacaaaaccagtagcatcaacagtttcgataaaaatgctgtaagtttatctggtaaagacaacagattttgaaaattacctgcattttgttcttgttccatcacacttgctgtaaaaattccaataagtaccggaagtcctgctcctattgcctgataaaatgcaatcactttcatattttcattccatggtgaaaaaaagtaatatattaaaaatataacgctggttataatcggaatcagtaagtgtgccagaatcacagatgttcctttcatctttcgcaagtctgcattaagagatcttccaatcatcttatttcacctctcttctctcaaaccatttcaaaaacagaaccgttacaaaaacaaaccagatgattgagagacacattcccggaacaatgactcccgtatccaaaagaggattccctgcttctgcggcaagtccatttggtaaaacatgaagcaacgggcacatcattcgcatagggattgcagaaacaagtacataccagattctggtttgtgatattaccacaccgctgacggtaataaataggcagacgaacaggtttacaatcattccaaatcgttcacttaaaaataaagctaccggaatctcccataactcagaaaccgtcagaaacaatactgcaatcaacgctcctccaactggaacatgtgtcgttagaagaaagcctccaagcgttgctcctgcaaacacaatcacattagaaaacaaaatcatgtacccaatataaataattttccccagcaacaattttcttctgtctgtgggaatagtcattaaatgatagtattttatctttttctcctgcgccacagaaagataacaaaatagagcaatcatccccggcagcaaaagtgtataccaccagttccaaacactttctgcataagcatttgtcatcccaagagtaaatataaatgccatgacaaatgtaagaagaggaaatccccagataaacttttttcgcatggttcttttggctttttgatgttctgcttttataatattaaccatggatttcacctgctttctggttttttcttaccacattcataaacaaatcttcaagattatctccctgctttaatgctccttcgtatcctaagattccacctgaaataatcccgactttatctgcaagtaactgtacctctgagagaatatgactggagagaattacagtgattccctgttccggaaaagaccggatcagctctcgtaattcctcgatgcctattggatctaatccattcgtaggttcatccaatatcaaaagttccggttctccaagcaatgccattgcaatgcctagtctttgcttcatccccaaagaaaactgtcctgctttcttctttccggtgtttgtaagtgatacaatctgcaagacctcatcaattctgttttcatctgtaccaagcaataattgtcttaccttcaaattctctctggcggaaagattttcataaataggcggattttcaattaacgctcctatttttgataaatctttcctacccaaaagttttccatcaaagtaaatctttcctgcagttggtttcatcataccggtcagcattttcaatgtggtagatttaccagcgccattcggtccaagcagtccataaatctgtcccttttcgatattaagtgaaacattatttaccgctttctgttttctaaaatatttacatagattttgtgtctgtaacatcatttccatctttactatccttccttctatatttcatttcttactgaaatataacctaacagaaaaaaataaagatttgatgaagatttattcccgtatggaataaaccatcaattgaatatcattatcagaactcggctttccactgaaatcagcaaagctgttacaaatacgaagtcctaatttacagaatatctccgtgatttcatccaaactatataaccttataggatttccttctttcatttcaggcttataaagtgcttctccatacatatagtctacccgcccatatatcagcgtttttctatccttctcccattcaaaagcagataatgtaagtcccttttctcctgcatcccataacttgcaagggaaatgtgttggggcatagcttccatactctctataagctgtaacatatcttcatcatccctgactttaaaaggatgatctgggaaatcgtcaatcagccccaatggaatatcccggattttggaaagcttttcttcttctctctgagcctgcgtggtaaacaggtcatcgagcttcgtgagcgtgaagtcgctctttctgactgtcatcgccatgtcaggagcaacctgacactcataccgggagttctcgctgttctgcatccacaaaagttatggcgtacccgataaggtggctatcatcagaattaacgtcttagtgacctgtatattcagttttaaatttcaaaggaaggcgttccatttttgttgattggaattactcccttcacttatttggaattgctcaggcttttgacaccctattttttataaatttttttaattatttttttgagagagattttagaacaatagataagtagaaaaagcttcaaatcccgtgtataattaagaaataaagatagaaacaaatcggaatttgtggaggaatagtgcaatgaacttctttgaaaatactcgtaagccacaaggcttcggcggaaaattgatgacgaagatgatgaacatcggtcacgccaagttatcacaatggggattctcaaatatctcagtgaattcggacgctgcggtactggatgttggttgcggaggcggtgcaaatattgtagcctggttgggcaaatgcggaaatggacatgtgacaggaatggattattcgaaggtcagtgtggcagaatctcaaaaactgaacgccgccgccattaaacaagggaaatgttgcgtggttcaaggtgatgtctctgctatcccttttcctgatgcggtttttgattatgtttctgcttttgagacagtttacttctggccgggattggaaaaatgtttttttgaggtaaatcgagttctgaaaaacggagggacattcctgatttgtaacgaatctgacggaacgaatgacgcagatgaaaaatggacaaagttgattgatggtatgaagatttacacatctgatcaactcattgctgctttgaaagaagcaggttttacagagataaaaacgtattcaaatacaaaaaatcattggataagtattgttgcaacgaaatagccaatttctagtttgtataacaggaaaatttaaatttaacgcttgaaaaaaaggagaaataaacatggcaaagaaagaagaaagatttgaagttacatttagagacggaagtcagcttaaggatgaaggagttcgccaaatccttgtagataaggagactggggttaactatctttgttggaaatctggatatggagcggctattacacctcttctggattcagaaggaaaagtcatagttacaaagtaaaatcggtagttatggaggtgaaaaatgtatttcacagacgaaaaagactatattatgcgaatgataaaagaaatggtaagagtattattttctttaatgtttgggaaaaagtatgtttctgttgaacttgaaaaagaaaataaatatgaagtatcagggaaaaatttgaaagattttcttgatatgattgattctggggaaattaacgaagcagagaatatacttttagatagcattgattatacagacagaaatgaggtaatggcagcagctcttttctaccaataccttagtgagaaggatagtgagtttttgaaaaataataattatacaaaagaagaagtgatgtctggttttaagcaattacttatgcagtcaggatatactgatttgctatgtttggtcaaagatgaggagtaatgtagaaaattcaaagagataagagtgattggttgaaaggagaaattgtattatatgttctatgattatatgatctatattgtttttgactttatgatggcagtgattatgtttttgtttggaatgtggttttataaatcagaaggaaaagctgctaatttcttgtcgggttataatatgaaatcagcggatgaacgaaagaaatacgatgagaatgctatgtgtaaggcatatggaaaaagaatgatgtttatgtcagttccttttattattggaataatcatagatatccaatatctaggaattggttgtttgattgcatgggggatatggcttattatgtttgttttgttgcttattgatagacataaaagagaacgttaaattcccatttattgggaagtcgctgagaacgaaaaatcgggatttgtctgtgaaaagcccgtgaataagcggatgttaatatgtattgcttgtggcaacggctctattgaatatagaattgagctatcaaaaacaaggaggcagagattatgctaaatgaaaatatcaaaagaattagaaagtcaaaagggctgtcgcaagaagaactggcaattaaactgaacgtagtaagacagacagtatcaaaatgggagaatggtttgtcagttccagattccagtatgctgattattttggcgaatgaactggatactactgtaagtgaattacttggagaacctgtagcagaaccgactaccgatgatttaaagattctttctgaaaaattagaagttattaatttgcagcttgcaaaaagaagtataacaaaggtaaaaacgattcgatggattcttatttcattgtgtgcggttatagtggtaatatttatcgcacttgcatctacgaatagtttttatttgaattggaattacaatgatcctgagttggcagtggcaggaacaatactgcatgggtttgaattcttgtttgtaagactcgcaccgattgtttttttgacttcggtggttggagttgtggtgacatataagaaaagataaattccagttgatatttcacatattttaggaaatttaataactgttatatttgattatcaaattcttcgcaaacccttgaaaatactaagtttgtagcaagtgtacttccccttactctttcccttgtgttacattctcccattagctttcatgaaccttaatatgggaaaaattaagggaaagaaaatttcataacacagtataacatataacaataacgacatggtgaactgattgaaatgttttcgatatttaactctataactgattatcaaaagaaaatggagataagatacgatgagaacaatttatgcagaatacaacataaatcacgatagtattgatgtttacacaagtgctggatatatgcttcgcattgactgctgggaagctgaaaaagatttaaaaaccacatatagatcagaatgtgcacttacttcattagctgtggatgagcctttggaatatgcaagattatatcttgagggcaatttacagatgtgggtggatgcagaagattcattagaactttattaagtgaaagagggatagtgttcattaagagtgctatccctctttaaagaatgtgcgaaatgcaataattacatattttctatggattaacagagcgcctaaaaataatccatgtacttatgaagtaacaaatcaataaaattaccaaaatccccattgttgcccctatttgtaacatcaatgtactaaacccaatataggctgaaatttctgctgatatggtttggataaagtaagctattacaacagcagctacaatgattgctgtgataattggaagcccaaaccaaacacttaattgttgcaagataagttttccgatatgcttttcttccgcccccaattttcggagtacagagaagcgatatttatattgtcctgcgtctaagagttgttgcaaagaaagtacggtaagacatataaccatcagtacgacagcaccataaatcattgcagtctgtaaaataaagttatttgctatggaactattgatttgcagtgtgctaaaacgcacgccataaatagccccggtttctgcctgctcgggatatttctctgtaaaaagtttttccagtttccttgcattttcataggagatattttccgttgttgtaatatatcggttttttattactggcaacagcttttcacaaatattgtctggaagtacatacaatacatttgtataggaattgtacgctgtttctccaatcggatcctcataataggactgcccggaaagagtcaattctcctgcgtctgtcataatgctggtgtgttctttcaaaaagctatcccgttcttcctcggtggcgattgctttccattgtgttgtaaattcatcttcctccagagaaatctgttcgtaacccagcatttcccgtatagtgttataatcactcaaagaaattgctacaatcggaaaatcatatttctgtctgttatgaaaatcgtctttctctggcagatatagattgaacgtgcaatcataaactgtatctattttgtgttctgtcagaaactcagtaatgatttcataactgtcttgcggcagattttcttcttcatatacgtcattatatcttgaatatacctgcacatcatacatagagcgcatatccaaataacctgaagcccagcccgtcaaaataggggcggcaataaacatgaagattgcaaggacaagggttatacaaatcagcgtcattgttttgctggttgtatttagttttgatataatttgcccgaaaaagaacaggttttctcccttgtatctatgttccggcgattttactttccatgctacaatcaagctgctggcaagataaatcaatgcacaaataaagaagagcaaatcaatcaatacaaataccagatattgattcagtattccaccatgtaaaggcaaatagtattgattggtaagagcaggtacgcttgctgctaaaaaggcgtgcaatacagaacaaataagcagcccatcaatcaacttttgaaaagcaatttttttctttttcaacatccataatgccgcccagcctaatgtaacaacagggagcaaaatatttccccaatacatgattttcaccgggaaaacaaagcgggagtcataataaaatcggacattttgtattcctgaaaacaattcccataaagtaaacattaaaaacagaattactacgacaggaatgaatcggctctttttcaattctggctcattttctttctctgcggaaagcatatcaataatttttgtttttttgattgtgcgtgtattgaaaactcctaccacaaaaaaacttaccacaaaaaatatcactgtcagcaaaacggtgtccgggaacaatgtccatgagatttcataaggctctccataagcagtaaggagcattgcggtaatgaattgagagcaaaatacaccgcaaaaaataccaatcaaaatggaaaacatacccataatcagtgtttctgcaaagaaaatcctgccaatagttttttgttccattcccataatggactggacagcaaactctttttgctttcgtcttagcatataatgattgacgaaccgtatcaaaaataacaacagcaatgttatcatgcagattgcaattttcattccgtcacttaacagagtaaaatcatactcgctgcctatatccgggctataataactactggaaatagacaagaacgcataaaacaaggtaacacagattgtcattgtgacaatgtagaccagatagtcttttacagaccgttttgcatttctgaaaacaagtttagcatacatggctttgtccccctccgatcatggtaaggacattcagaattttatcaaaaaaagcacttctgctgtcgttgcccttgcgcagttccataaagatttctccgtctttcaaaaaaagaatacggttggcatagctggcggtaaaagcgtcatgagttaccataagaattgtcgccctaagctgttcattgatactttgaatggtagacagcaacatttgtgaggaatggctgtctaatgcccctgtcggctcatctgccagtaagagcttcgggttgttgataattgctcttgcacaagcacaacgctgtttttgtccgccggatacctgataaggatatttgtttagaatatcgctgatattcagctttccggctatatccaaaatgcgggattctacgctcccggcagggactttgttgattgctaatgccagtgcaatattttctgaaatcgtcaatgtgtccagcaaattgaagtcttgaaatataaaccctaaattctccctgcgaaaacgggcaagggattttggtttgatttccgttatatctgttccatctaaaaaaatatgccctgcacttacggtatcaatcgtagaaatacagttgagcagcgttgtctttccagaaccggacgcacccataattccgagaaattccccagcttccacagaaaagctaatgtctttaatggctttggtaatattcccttcattgccataatatttctggatatgttccagtttcaaaatcgtattcatctgataaacctccttaactgttccatatctttattgtaaatggagtatctcattttttgtatcaagttttcttacacagttcttacaaaaatgtaagaagtgcagaacctgtcagccctgcactccgataataaaatcattcatttgaaagataagtgaaatcgttgttcctctgttttcggaataagcagtaagccctattcccagtttatcacatagacgcttgcaaagatataagccaattccagtagaatttttcccggttcgcccattctgacctgtaaatcctttttcaaaaatacggggtaaatcacttttaggaatacctatcccattatcgctgatagatagcacaatcttgtcattcgtttttgttgccccaaagtgcaaaataggctgctctgcatggtatttgattgcattaccgataatctgatttaagatgaaccgcacccatttttcatcggtataaacttttgtttctatatcgtctatctgaattgacatattgctttgacgcaaaagatacttattatctgcgattgcactatgcacaacatcgcataaattgacttcacggacagaatagtctttttcagcgtgttcactccgggcatagtaaagtgcctgttctgtatattggttgatattctctaactctgccaatacctctctggaaaagggagaacggttattctcacacagcagcttcatcgctgtaattggtgtttttacttcgtgtatccattgttcaatgtattctttatattccctgcgttccctctgtacttcgccaatccgttccaacatagatttttcagccattttcataatctggtaaaaaacctgttcatcagccctttccggcacttgcatgatttccggcaataaatatcgttcttctaattgctccgtcatattgagcaatttattcagatatttttttcgtgagaaataaaatgccagcaaagataaaacaaggacaatcgaccagactgcaaaaataaacaggactgtttggataggattatcgcttgcaatcaggaacaaagcaaggacaagcatacccagcagattgattaaaataacggggagttgatttttcaaatattgttttccactcataatgtatatccttgcctgtgttttgttttaatgaaatctacaagtccgattgctgccagtttgtcgcgaatacgggtaatattgacacttagggcgttatcatcaacataaagctgattgtcccaaagaaaatccacaatatcatttctggaacagatttttccggagttcttaaaaaggtagtagaggattttcaattcattctttgtcaattctgctttctgtcctttgtactctatcatgctactctccaaatgcagggtagcttctctccacatataaatttctgtttgaggggaacggtaggctttctttaccaatgcagcaattttagcaagaagaatagcgggattataaggctttgtgataaacgcatctccacccagcataatgctgttcagttcgtccatatctgtattgctgcttgttacaaatacaatcggaatatctgaaaaggtgcgaatccccgagcatatttcaaaaccgttattccccggaagttttatatccagaataaccagatgtggcgcagcttcttttaactgctctattgttttggaaaaatccgtaactgcaaatacttcatatccattcccagacaaaagagttttaagctgtgtttgtatcgtaaaatcatcttcaatgattagtattttttccttcatagagatacctccctgacactttattatactgtatcagagaggttttctcaatcgtattattgaatgggaattttagaatgattttgtacatagctttgtaaaaaatgcttaatagtttcttttctcaaggtacgattctaaataacacctaagtccaacatatgcgccctgcaaaagtacaaaaagcaatagaagatttactgacagtgcttttttgattgcttctccaaaataaatgatgacagcagcacttgtcagtatcatcagtagagtaatgacatcccaacacttttccctatataattctataacctttatttctatcagtatcgccagtatccctgttcctgccacacatattcctacaatcaatattagcaatatccaatataccattccggctataaaaggatttggaatttttgtgctaatctgtgccacagattgcccgacctcaatcgtccaaccgataaaagtttgtatgaatgacgctgcatcatggaagaatgatttgcaatcggaaaggagcacatctgactgtactgcctgaaaaagagtggttgtcagcgaataccatgcaagaaggaacaaggttgtttggaacattaccgtttttgctttatattgtcctgcaagtcgctctttttgtgtttcgtattttgcttttgcattctgatagtctgtccggtcacaggcttcacatttttcatagagtaccggcttttctaccggtatctctacgattttctgatgtgtccgggcataatcccgttgttgtgttaagcatcgtattttatcttgacattcccctatcgtgacgtttgcgcttcgcagcttctctttctcgttccgcaatgctctgtctgctagcttcaagtcgttctttaatgcttgaatattcccggctctgttctctttgtttaatttctcgttcaaggtcagagattcgttgagctgcgtctttagttccacgataagctggtctttctgttccagttcttcttgtatctcctcggtcaagaggagaagttcttccaactgttcggcgttctttgattctctggattcgttcatctatatcacgtcctttctctatctgctgttccagttcagcaattcggtgttctgtttcagtaataaactgttttcgctgttcagtttctgtaccaatttctgccattgctgattttcgttttccaaaagttctatcttcgttttctgttcttccatcttggaaagcagttcctcggtatttggcaaaatgttgagcagctcggataactcgctgtttaatttttgcaatttctgattctgttcctgcataagagagagttgggtgtcccggttctgcatttccagaatcatttctgccattaaggtctgctgttcttcgatttgcccaatcatggattccattaagggtataatttcccggctttcttctaatgtcatttaatcgctccttccataatgataatgcacccgatacttttccaaaggtgtccagtatcttttgcaataacgtgttttgttgttttatgatttgattttccgctactttccacgaaccttttatttcctgcccggcaagaaacttttgttcaatctttcttgcgtcagcgccttcatggatggtaggaatctggagttttccctgtttttcataagaacggtgatcgacctgattatgcaaaggaagatgttcattacacacctttgcccattcactccgccacagttcacaattttttggattgttccatccgttagcatcggtcagcacccgtttccattgcaggcggtttcttgcacccatcttctgaattccgttttcgtctaatacagggatacggattccatgacggtcagggtttttcttatcctgccaccagttcggatgggattcatcaatcacgatatttccgtttttatctctgagaaaatcccaatccttgacttctttctttccccaagaatgatccgggttaaaaggacgcatagtcagaagcagatggacatgggggttgccatcccctttatcgtggatactccaatcagcacacattcctctatctacaaaagttttttgaatatagtcagttgtatattgaatttgttcctgtctgttccattctttgggaagggcaaattcaaatgacctgccaagttgggcatctgcatttttttcaatcttcaatacctcattccataacctttgtttctgaaatgtgattttaaatttttctaaagcagcttctttatcttctgatcttttgtatcggacagatttttgaaagcgttttatattttcttctggtactatctgccattcaggaggtgcgttttcacacatcatcagccgagtgtagaccacttcttttttagaagtgtaataactgattctcccggtttcctcgtttttcatcacatccccattgagatatgcggaagcggagataacagatttccctttacttcgtccgactattttgactgtgtaatgaaaaatcgccatgtctggattcctcctttctgcacatccggcatagatttccggcaacattgctttcggttttaggaaaagcagcattgccggaacgccctctgcgtaagagtgccctgcgcatagcagcctgcatggaatgcgcctctctggcgaagagtgcctcctgcggcatgagcaggtctggctgaaagccccgccgacggaacgagcccggcaagcgtgaacgcagaccggttgccacttgtggcaaacttattgggacgacctctggttgtccataagtgcgcccttcatgaaaaagcaatgaagggaatgaaaaactcatcccctccgccattacacttcctccatatcggtattgacttctttctgcattgcctttgagaaaaatttcccgttggcttcctgccttttcagaaaaccaatcagctttgggatgtcttcttcctcaataggcgcaccgagaacggattccaccgcaccgccaatctgacagagcctatgggttcgttttttactttcttcggctttctttcgcttcagaagttctttcttctgtgccgcatatcgtttcgccttttcaaggctttcctgctctttcttttccatttcaagcattcgtgcttcataactttttgttgattttgccattcttacattctcctttccttcacaaacataagttcttggttgcgtatcagaagaagcacatggtataatcttcttgcgtgtaggtatatcatggcttcggtctgatagaacctttggcggtttcttgggaagccgcctttttaatttgccgcagttcttgttacggcttttacatttcctctatccctcaaatcacgaccttcattcgcttccataaacatttccagaatatcggttttaatcaggactttacgaccaacctttaataccggaagtttcttccattctacaagctgtcttaaggtgtttctgccgattcccgtatagtcggcagcttcttcgatggataatgcaatttttctttgcgtcatataatcacctccttataaattgcattatgcaattcctgtgatgtaagtatatccttttcacatctttttgtcaagcgttacgaaatgttaaaaataaatattgcattgcatattgcaattttggaaaaacaatgctataattcatacataccgaaaaaggaggcagtcagcatgaaagataaagaattacgcaagctgataggcagcagaataaaacagcgccgtctggaattgaatctgacacagccttatgtcgcagagaagatgggagttaccgcttctacaatcctgcgttatgagaatggttcgattgacaatacgaaaaaaatggtgctggaaggtctttcggaagcactccatgtatctgtggaatggctcaaaggggaaacagatgaatatgaaaccgacattacggataagagagaattacagattcgtgatgcgatgggagatattctggaacagttaccgcttgcccttaccaaagaagaagatgctttttcaaaagatttattactgctgatgttaaaacaatatggtctgtttttggattccttccagttcgcctgcaaaaacttcaagggaaatgctggtcagacggatattgccaaaacaatagggtttgaatcgaatgaggaatataatgagattatgttcttaagggaaatcactcataccatcaatgcttttaatgagatggcagacattgtaaggctctattccaagaaaccaaaaacagcagaacaaaggcttgcaaatcttttatcagaagtcttatacgaagattccgaatcggtatagtaagacaaccggagttatgatatacttacacgcacgaagcatttcatcagttccgattgtctaatatcgaaaggagacatacgattatggcaaaaggatctgtaagaaaaaaaggaaagaaatggtactaccgcttctatgtagaggacgcaagcggcaatcttgttcagaaagaatgcgttggaacagaaagcaaaagtgaaactgaaaaactgctccgtcaggcaatggatgattatgagaaaaagaaatttgttgccaaagcggataatctcacagtcggacagcttttggatgtgtgggcagaggaggaattaaaaacaggtacgctcagcaatggtacggtggagaattacctcggaacaatccgaaatattaagaaacacccattggcagaacgtaaactgaaaaatgtaacctctgaacatttgcaatctttcttcgatttgctttccttcgggggagttcatcccgatggaaaagagagaaagggttacagcaaagattacatccattctttttccgcagtcatgcagcaatcattccgctttgcagtatttccaaagcagtatattacgttcaatcctatgcagtatattaaactgcggtatcagacggatgaagtggatttgttttctgatgaggatatggacggaaatgtccaaccaatttcacgagaagattatgaaagactgcttgcttatctgcaaaaaaagaacccagccgcaatacttccaatccagatagcctattatgccgggcttcgtattggagaagcctgtggtttggcatggcaggacgtaaatctggaagaacaatgccttaccataagacgcagcatccgatatgatggctcaaagcgcaaatatatcatcggaccaaccaagcggaaaaaagtaagggttgttgattttggagatacactggtagagattttccgtaatgcccggaaagagcagttaaaaaatcgaatgcagtacgaagaactttatcacacgaactactacaaagaggtcaaagagaaaaacagagtgtactacgaatattattgcttagacagaacgcaggaagtcccggcagattataaagaaatttcttttgtctgcttaagaccggatggttgtctggaacttccgactactttggggacggtatgcagaaaggtggcaaaagcattagagggatttgaaggctttcatttccaccagttacgtcacacctatacaagcaaccttttagcaaatggagcagccccaaaagatgtacaggaattgttgggacactcagatgtcagtaccacaatgaacgtctatgctcactccacaagagatgcgaaacgaaaatcggttcggcttcttgataaagtggtaggcaatgactaaaaaatttcccttatttcccttgtgattatctcataagggcaaaaataagggaaactacatatcatttcactaatgaacaggcgggaaagcctgtaaaatagggaaagttagaggaataattatataaattccagtttgtatggataatattcccattaaaaagaccgcttgcacttcggtgtaggcggtcctcttatattctgggcaatttgattagataaataaattatgcttcttcttggctgccaataccttgcagagaacatcatccactgcgtcagtatatctgccttgttcgagaagctcatttttcagccggataagtgactgaataactctgctctgttcttcggctgttaagtaaatatgatatttcttttctctcattggctgttcctccagttctcaaatacgtttctgatagtcccgacatcttcttccgtatcggaagtaataaatatatgtacgctttgaaaggctgctttgatacgctgagcataagcgatttctgtttcattggttttcataggcaacttgatccgtttaattcctctttgctgacagagatgttcttttaagatttccatatcttctgaaccgctgttcacttcaatcgccacctgttcagatggaatataagtatcaagcggtatccctaaaactctgtctgagccgagttcgattttcaatcctttcatatgtgaataataactgagggcaaaagccggaaacactgataaatactcctgctcacatatcctgcaaccttttccgagaattgtccgttcattgatcttcatactccatgaatgtccgtgcctgcatttccaccacgctctctttgctgaagttcgtgatacttctgtcggcttcaatttattctgttcataatcccattcactgagaaactgactgtctgttatcgccaaatcattatatccggcaagaacttctctctccgcacaaacggggcacaccgttcctttcacacgggcattgatgactgacttccattcattgccacatttcttacaatgccaccacacatttttcctcgactttgcatttacctcatcaggtttcaacggcaagttcttttctgaccactccgaagcaatttcagggtgtgttgtctgcaaatcgttaaatcctttcaggaatatgtacccactgcaatacgggcatttactaccaccggaacgggtagaaataagagtgttccactctctgccacaatccttacacttccaccaagccttacgattggcaaagaccgtaacctgagttggaagtaacggataatttctgtccgaccactcggctgctatatccggcagaagtgttgcaaggtcattaaatcctcccaacactttattatgtgaacaatacgggcagcctgtcctatttatcgttctgctcttaacgacagcttcccactcgtgtcctttctcacatctccaaatcactttcttatgagaaccaatagaaacctctgtcggttttatcttattctttttcgaccactgttttaccagtaatggctctaatgtcgccaaatcgttaatacctgcaatcactctcgcaccggaacatattgggcatttttctccattagaacgagccttaacgcttgtctgccattcgtgaccgcaagcacctttccaccatacttttttatttgaaccgaaagtaatgtcatcaggtgtaagcggtaagttcttctccgaccactccgaaacaagctccgggtgcacttctgctaaactgttgttcatagccaaacctcaacctccttgtgcttagagtatatgaagttttggctttatcttgtagtttgcgaatatccgtataaatagaaaaaaacctttgagaaaaggatttctcctctcccaaagggtagtttaacttttacttagaattatcttttttaataactaagttataattgctatcataatacagtccaagttctctacacattctatcgttcacattatctaacgctttcttatattctgcatacgttggagacagaaccattaaattaagaatgaatatatcgttatatcctttattttgtaactctttctgcatttttctctgtgcaataaatgctggatggtatttcattataccgtttttcattttagcacctttccatactttttcttttagtctttcatattcactttcactcatatcacgataataggctatcatctcatctgcggttctggtttcttgtgcaatcccacctatcatcttcgcacctattcccataataaaaggaactttcaatgtcgtttcatcgcaatattctaatatattctgtagtgcctgcttctgttccagagtcttcaaccttacattaagaaatggtttgaaatgacttttaaaataatctccccattcttttcccggtagcaaagactcaattgcattttcaacggtttgataatcaagtgcctcatttgctttgtctgcgtcaccatcatctataaattgcttcaaagcttcaagttctgagtcttttaaaactttttcctgtactttttcttgataaatacgaagaagaatacttttgtcgccagtttccaaaaggctctgtatgtctttaatactaataccgagttttctatatactgaaatcttttttaaagtttcaacatcttgtgcagtatagttacgataaccattgttatctttatccactgacagcaatcctttttcttcataatacttaactgcacgctttgtcattccaacctcatttataatttcatttaataacatcagatgcacctccttatgatttatgttgatagtataagcgtatacgctgcgtgcaggtcaagagtttttcgtctttcttctaaaaatgggcaatcccgatttcaggactgcccattcattctgctaattatgcgattttttcttgcttgcaccgatttctgcatcaattgatgtaagtttgatgtaaatcgctgttttttcagttttttatcaaatgaagtacgtcccgtctatttactatgaaagtcctgaacggcagccatgaatgagtcatgcttgcatgaacgaattcatggatatcgggcaggctaaactgtatgagtaagcagggcaatcgcccggattacgaatgcagttggcagttacaggagtgccataggcacggagtaactgactttcatatatttacatcttaatagagctttgcacctgctggaatgtggttatcaaccatgatcagatgcagttcttcatcttctgagtctttcagattatttactgctgataataacataccgcaagactcgattcccatcatctttcttggtggaaggtttgtgatggcgatcagtgttttaccaaccagttcttccggctcgtaataagcgtgaataccgcttaaaatcgtacgatctgtacctgttccgtcatccagtgtgaactgaaggagcttcttgctcttcggaactgctacacactctttaacctttacggcacggaaatcagatttgctgaatgtatcgaaatcaacctcttcttcaaataaaggctcaacctttacgttggagaagtcaatcttcgcgttgtctttgaagaatccgttgttgtcgtttgcagttgcttcttctactgctccggattttcctgcttttttgtcagaatcaagactcttcatcgtaggaaccctttttgtggttctttcatactcgaccaagctggtgttaatactattaaattctccatattccaattatcccccatacttcatatttttgctctactttgagtcactttgcgggcaaatgatgtaaaatatgatgtaaatgatgtagggcgatagtagtatatgcaagagcatattcatatacaagaaattataacttctcttatttacaatgtcaatccacatcaaagtaacgctgccttatcttttcctgcttcagaacaagaaaaaagaacacacaacactctgtatgttctctttctgtatgtgaagtccaatattatcctttgaagtagctatccaatcctttgaactctgccgctttcatttcttttgtaacatcagcatagatgttcagtgtagttgaaatatctgaatgtccgagtgcgtcttgaatgacctttatatttactccagcttcacacattcttgttgtaaatgtatgtctaagcgagtggcagctaaaatgaggaagtaacacatcaggttcatcactgtgcaaaaactgctcatcattgcaatcacggataattcttcggattgctttgttgagtgtggcttggtgctgtgcctgaccaaaacgattgatgaaaataaaatctgtatatccgtcaatcgtgacctcgcaatgaagtcctaaatcttcctgcttctgtttctcctgttcaaatgcttctctcacaaaaccgagcattggaacctgcctcatactcgccggagtcttcgttgtatttacattgaaataacagccgcttttacttccctcagttctgtggtcataatatacaagagtatgattaacatcaatcattccactttccatatcaatatcacaccatctcaatccagttacttcccccacacgaagtccagttcctatcattactgcaaagaccggataccagtgttcatatacagggtgggttttcaggaaattcagaaatagctcctgctccggtttcgtcaacgctctacgcttttccgactgaaaacaatgtgcttttttcaattctctcaacacattatctgacgggttatttctgataaagtcatcatcgacagcaatctgtaaaacctgatgaagaaccgtatgtatattatcaatcgttgaaggcttcaaatttctttcatcaacaagataattgtagtatttcttaatatctgatttcttcagcgttgatattcttttacttccaatcactggtcgcacaaaggtattgtacatatatttgtaattttcaaaggtattattcttcagccctcttttcatatttgcccaaaggtcaaataattcatcaatggttgtgtatcgtgcttcggtcttaataccatcacatttatctttctgaatacgcttttctttttctctcaggtcatctaaagttcttgcgtaaacaaatcttcttttcatctggctgtcctgccagctaaattgataagtaccgtcttttctctgaacctctccggttttcagaacaacccttgatttatcttttctttttgtcgccattgtgtcctcctaaattctaaactgcttatctatatatttgtccaatcgttccctcacaatatggattttgttgcctatccatattgcaaagggacaacctgcttgattagacaactcacgcaacttcgttcttcctataccggaatatgctgcggcttcttcgattgtcagccactttctttcccatatcggttcttcagcattgcttatgagtttttcctgatatgttcttacttcggcaagtaagcgttcatcatcattcaaggaaagtaagtttttcaatgtattcatcaaaaatcctcctcttaatcattcgacgatttcctatatgaagaacaaatgggcattcttcttggcttgttagttttctcagtctttctctacctatgccagaatattcaactgcttcatcaatcgtcaaattagacttatgccatatcggcacatcatatttttttcggataatcttttctgtatctgccattacggaagcacctccttgtttttttctgcccttatgataattaaaaaatggcgatgagcctattatgcgaaccgacccatcgcacattttacaaatcagctatatcgaatacgcattatcaagatattcgtccagttttcttcttttaatcagtcgcttacttccattccaaagaacaaaagggcaaaactccgagtcggacatttctcttaattttcttgagccaataccacaataagctgcggcttcttctactgtaagattggacttcttccagataggaataatgattttattttctgtcattgcttcccctcttttctttctttgatgaaaatctgtcggtaacaacataatcccaaccatccccatcacacttatcacatctgtcttttcgctttgcaaatgggtcaagtcgccttacaatatagtccggattgtggatgtaatcattcaggcacttcgggcatagacaacgaatattttcttttccctccagcttgtaaacccaaagtccaaaagtctttttcaaagttgcgtttatctgcctgaaaagtttatcgtcatctaccgtacctatgtattcacgcaaatcctctctattgactgtccgtatctgctccagaagaaccattgacggtttcttcagtccaaactcctcgccaagaataatgtgcgatggcaaatatcttttcttgattacacttgtaaccgctgcaacaataatcgtcggagcattctggttataatcgtctgcctgaatgacaagcaccggacgttctccgctttgtactgaaccactgttatctccaaagtcatagtagaataaatccccacgacaaatcattttttctttcatatacataacctcacaagaatctaatttttaaagtgtcattcgtatccggaatgaaataaccccttcactcatttggacaaaggggtatgaaatgcacacccaaaatcagagattttcataaaatttgataaagtttttctttgccgctgcaatagacttatctacggagctgtaatatacgccctcctgctttgcaatcactctggaactcagaccgcagcacacattcttcataagacgttccctttgaagtggctgcaacattgaaagtgctatccttgctttcctgatttcacactgacgcaattcttctctttccagttcaagcctttcttcctctgctctttcaaacgggtcatcaaacataatggcaagttctttatggaactgtgaggacatttcatcgtcatatccatagcagtcaagtgtgcgactgcttctctttgcatacttgtcctcatttcggtttgcatcgtcaattacctctccctgtgcaatggaaagatgaacaaacggagaatatctttctataacaaggggatacttctcccaaagctcttttacagacaattccgtaataatcgcccatttttcatctccggtataaccgttatattcgtatttaaggtttatcagtttacaatcctttgcaaataattcttcttgttctgttaatgtaagtttgtttgtcatttccgtaatctcctttgaattttgaaaaattgataagtttcaaaattcggagattacgggtactcagctatctggcactgccatgcgttataaaacataaaagccctttcccaagtaagggaaaagacctaatactgcacgaagcataatcgaataaaacagcaacaaaaaaagcaccgtcgaatctggacagcaaagaatacttctattcttcacttatccggcttcgtacggtgcttggtagtttagcaaataaattgcttatctccgcttactcgattagaaatcgtttcgatatttacttgtaatcttcatcgcctgcaattcctgccatatccgttcctacggattcttcggaagtaagcaagatttaaaatgtggacattcttgcatttctgacacttcacactcaaatgtccggttgcgtctgaaaaaactctttgtatcctgaacccgcaagtcggacagagaatatcacgctctttcaggctttcagcttccactcttgacagaagcaatctcttttgtatttcaggtgctacctgagtctgtaacctcattgagaaacacctcccagatttaactcattggaaatgtactcaaggatattgtgatactcaaatagtcccatatctctcaatctgataaccaaggctgtataagatactccgatataagctgccattctacggataactgctttatcctttgaagtaatggtattatcgccataaacttttatcggatttgactgattatatttcgccaaggcattttcaataattcttctcggcataagaagcgaagctcccattgtatctgcctgccactcaacagacgcaaacatctgagccagttcctctttggaataactacgctcactgtcatactctgcatgaaagcatccttcactcggcattgcatacatcttactcaagatatgatgtgacgcttcgtgtgccattgtaaatctgcgacgtccctgctccttttcagcaagaagaaatttatcaagtacgatggtatctttcgggaaaacaaagggaataatttttccgtcctgatgtatcagcagtggtgttgctccatctgccagaaaaccaatcctgcctgcatcatcttctgcaaaaaaagcgtattcaattcgtaacataagaaattctgtaatgaaatgttctatgtcgatggattgaattactcgattgctaaacttattagcataagctgttatcaagccttcgctgatttcttccaactcggctcttgacatataaatactcaagttgtgtccacctccgactccaccttgtccggcggtgcaactcctccggcaaagttctgttgtatttccgcactatccaaattgattagatagcgaattccttcaagtgttctcattcgtctgtcctctgttatagttctttgatgatgtgacaagccacaccctgaatgcagcactcatctacaatgatgtctttcatcttcttattttccgggtggagaatgattttcttattctcatcatctctgaagtagcgtttcaatgtattctgattatccacaagggcaactactatatcgccatcattggcttctacctgctttttaacaaccacaaggtcgccgtcatcaatccctgcttcaatcatagactgaccgcttgctcttaatatgaagaaatctcctttgccgaaaatagcagtaggaagtgatacatattcttcaatattttcttcctcatactgaggactgccacaaggaatagaacctacaatcggtgtctgtgtctgttcgccactgtacttacgggtcacattggtgcgaatctcctgcccgtcgtactcaatcatattcttctcagccatctctactaagtatttatatgctgtacctctggcaatgccaacagcttcagcaatttttgtagtcgatggggattgtctgttttgcaggtaataatcctcgatatacttttttatttcactcataagttcaggactcttgcttctcatacctgcacctcactttcttttctatcggaagcagtttgctttcgatagttttattatacctgatacgaagaatttttcaagtaggtttttcgtaaaagaaaagaggtgtcgcaatttgctaacacctcaaatttgctcccgaaacgcagaaacgcccaaaacctgaccccgctgtatggtttcggggcgattttgggcgttttctttcgatatgagcggctttgttttagcggcggtatcctttaccgacaaccattcaaaagccgctgtttgtcacttccgggtaacaaaaaagcgccgtattactacgacgcttttgtcttgctcggaagatggagcaagggaacgctattcaattatctgttgtactttttcttcctgcttacaaccgttgtgccaatggctacaccgccgctgatgaacaacagggcaatccaaagagcaaggttgcttgtatcgccggtctgcggactcttatcggatgttcccggtttggtactgacaggttttttctcaagagcagcaatcgcatcttcgataatctttgccatcttgtctacttcggattgctcggtaatatttttaccacggacaacagccttgacagcagcttccacaccggagaaatccttgtagtcattcttgtttagtgcatttgctttggcaatggctgcatcaacctttgtgtagtcagcgtccttgtattgcagggctgcaatcgcatcttcgattgcctttgccattttatctacttcggattgctcggtaatatttttgccacgcacaacggcattgatagcggcatctacagtggagaaatccttgtagtcatccttgttcaggacattcgccttggcaatggcttcatcaacctttgtataatcagcccccttgtattgcagagctgcaatcgcatcttcaatcgctttcgccattgcatccacttcggattgctcggtaatgttcttgtcacgcacaacggcgttgacagcagcttccacaccggagaagtccttgtagtcatccttgttcagggcattcgccttggcaatggcttcgtcaactttggtgtagtccgccctcttgtattgcagggctgcaatcgcatcttcgatcgctttcgccattgcatctacttcactctgctcggtaatgttcttgccacgcacaacagcgttgatagcggcttccacaccagtgaagtccttgtagtcatccttgttcagggcatttgccttggcaatggtttcgtcaactttgctgtaatcagcatccttatattgtaaagctgcaatcgcatcttcaattgccttcgccattgcatccacttcactctgctccgtaatgttcttgtcacggacaacggcattaatagcggcttccacactggagaagtccttgtagtcatccttcttcaaagcatttgccttggcaattgctgcatcaaccatagcgtagtcggcagactcgacgcacttcaaggtaaaggttacgcttttaccttttccacagtcgtatttgtaggtaacggtgtctttgtcactatccactgtcagcgtgtttccacttactttcccaccgctccagtcgcttgtcttggcaacgtcaaagtttccaggcaaggtggaaaggtcaaatgtgcggtcattgccaacaatgatttggtagatattaacgctacaatacaggtacttcatatctgtgttgctgacatccagagaggtcaattggttattgtggcatctcaaacgagtcagtgccgtattcttgctgacatccagcgtggtcaattggttgttgtggcagagcaaatcagtcagtgccgtattcttgctgacatccagcgtggtcagttggttgtaactgcaactcaaataagtcagcgccgtattcttactgacatccagcgcggtcagttggttgtaaccgcagtccaaataagtcaacgccgtattcttactgacatccaatttagtcagcgaatttccccaacagtccaaataagtcaacgccgtattcttgctgacatccagagaggtcaattggttattgtagcagtataatttagtcaatgccgtattcttgctgacatccagagaggtcagttggttgtagctgcagtgcaaataagtcaacgccgtgttcttgctgacatccagcgcggtcagttggttgcgaccgcagctcaacgaacgaagtgctgtaaagtattcaatgcctttcagattggagatacctttgtcatagcaatcaatttcttcaactgctgcgatttctgtatcacttaaactactgtccttgttggtatcatagtgttcaacaatagcgcggaaatttgcatccggaaagttggtatcgtcaatagcaacaccggcactctgaacggcaatgccattttctccttcgccactcatctgtgctagagctgcttcggattgtgtatccggcatatcgctgtcctggttctcctgaagttcctctccttccggctgggatgcttccccctcggctgctggttcgacatattttccacagttttccgccaaagcgccctctgcgccgcagacagggcactctgtgttcattgtttcttccgtgcaagccgtttcgcaggtgcatacaggtgtttcttccgtctcgctctcggcaaatgccgtggtcggcacaaggcagagcaccatgcacagagcaagcaggatactgaataatcgtttcttcatcttgtttcctccatttcgttgttctttgacagcttaaaatcgtatttcatttccagcattgtaaacagcttatacataacatctgtagcaattgctttaatatccagtgattgaataaaggcaagcacctttgcctgttcttcctccggtacacgatacactctcattgatgccgtcaaaaagcggctgagcttgcgttccaacggaaaatgaatatcacattttctcgccatatagctgcgcatcagtcccgccgtgccgatttccatctcataaaagtcgctctcggtatcatcggggaaattttcaccaaaaatctgcttcagctctgctgtggtatgcaggtaaatatattccgacgtgtcgggcagggaataggcttcaattagggctttatttgacctcagaacagaattttgattattagacgtattttcagttgggttttagtttttcattcaaggtagatataaaagagagaacaggggattatggcatacatctctaatatatgtgctatactggatttaactaagaagaaggagaagttctatgcaggtatcagacaaattaatcaggccactgacagaagcaaaatatttgaatgctgacaatgtaagcagataccgttgtatcatgcgtatcttttttgagcattatgaaaaactgaagtactggttgtatcaggaagaagtctatgaagagatgatacaggatccattttttgctgattatagaatggaacagtgtcagcaggatctcatgatgctgacagagtggaagaatctgaatacgatccaggataccaaaaaggtcgcatcgattgaagaattcaagaataaaaaataccggtatcagatgacggagtacagtgtggaggtagaacgtctggtcatccggttagagaatttgtttatagaaggtgcatcattagagccgacccttttggaacgtatccgaagaagtgtggagcgtttcccggagatgggagaaagagataagagtgaagtatacacatggtggacggacctgaataatgattttgtgcggttgaatcagaattatcaggattatatcagggatctgaatagcgtccgggcggaagagatgatgcatacgaaggaatttctggtgttcaaggatcggttgatcgagtatctgcgaagctttattaaaggactgcagagaaatgtaggagtgatagaggaaaatctgcgtttacagagcgaagagctgaaaaaacaggtatttgaaaaagtgatagattatgaattgtcaattccgcgtatggagatagaagtctcaaaagaaatgatagagcagaagatccagggacgttatcagagcatctatgactggttcgtggaaaatgaagggcaggagaacgaagcgggaaaactttttgatgctaccaatgatatcatccgcaggattacaagatatgcggcacagctgagcgagaaaaatgcactgggtgccaaccgaaaagaggaataccggaaggtagcagaattattcttgcgatgtcagaatgtggaagaagcacacaagatgtcggcaatggtattcggtatggaatgcccacagcatcttgcaggagaattgatccgtgagacggacagcatgaatatcggagtctacgaagagcagccaatggaaattactctgaaaccgagagtgcgtacgtaccgggaaaaatcccggagaagtgccatccgtgaatcggcagagcaaaaacaggaaacaagacgtaagttgcttgagcagcagaaaaaagagacggaaaaactacgggcgttggaagtagatggaaagatatattttaataaactgcctgtattggaaccaagaatccgcgagattcttttaaaatggttgtcagatgccatggaatccgcagatttttcggcaaggacagacgatggaagaagatatatattagacagaagtcaggcaggagaaaactgtgtggtacattgtgaagatggaaactttacaatgccgaagctgtcaattgtatttcaggaggaagtatgatgaaggagttggaagttcttttaagtaaaagatggatattaaaatccagagacaaagaaatgtattataaattaagagatgcactcggagaacttcgcaaatttactacagagaaaatgggctgtcagattattgataattttctcctgatcaaaatggagaagattccggtcattccagaaagttttatgggcatcatgaaattttcatcaaaagaagaatatgcctacctgtgtatgctgttaatgtatttggaagaccgggatgcacaggaacagtttattctgtcgcagctgacggaatacatcacggcaaatctgccgggtgatatttcggactggacgttatatacgaaccggagaaaactgatccgtgtattaagatttgcagtagagcagggaattgtcggaattacggatggaaaagatgaagcattcatggatgatgaagcgggagaggtactttatgaaaatacaggagcatccagatattttatgaagagcttttcgaaggacatcatggaatatacaaagccggaagattttcgggaaagtgattggttcgaagtagatgaagaccggggattcgcgagaagacacagagtgtataaaaggctgatttttgcgccgggcatgtataaagaagacggatcaccggaagattttgaatatttgaaatattatggagggagattgagcgaagaactggagcagctatttgactgtcaggtgcacattcatagaggaagtgcctatcttttgtccggtgacgactgcagaatgggttctgtatttccgggcaataattcaatatcggatattcttcttttgtgttttgggaagatgcgtaagaagatagagaatgatgaatggaagacagcagcagatgagagctgctgcatagaccagattgaatttgagaatctgataaaagatgtgaaaaaggaatacggaagtggattttcgaaaaactatcgtgagatgccggaaggtgaatttgtcaaaagtgtgatcgatgagatggaagtgtggatgtttataaggaaagatgaggcggatcatcagattaagatctgtccgcttaccggaaagatacagggaagttatccggcggattacatgggaggaagaaatgatgaatagtagatggcaggccaataaaatcgggttgatcaacttctggtattatgacgaacaggaatttccttttgtaaagggaagaatgcttcttcgaggatcaaatggctcaggaaaatccgtaacgatgcagagcgtagtaccacttttgctggatggcaatatgagtccggaacgattggatccattcggttccagagaccgtaagatgagcagttatcttttggaagaagatgatgggcgagaggagcggaccggttatctttatctggaatttaaaaggaaggacagcgatacctatctgacgatcggtatgggaatccgggcgagaaaagggaagaatctggacaagtggtattttagtctgacggatgggagacgggtaggaaaagatttctttttatataaagacacgggagaaaaagtcacactttcaaaaaaagaactggagaacaggataggggcaggaggacgggttattgacagacaggccgattacatggagtatgtcaaccaccagatttttggattcgagacggcagaagaatataaggaaatgatagatcttttgatccagcttagaacaccgaagctttccaaagatttcaagccgtctgtcattaatgatattctgagcgattcgcttcaaccattatcggatgatgacctgcgtccgatgtccgaagccattgaaaatatggatactatgaatatgaacttgaagaatagaaaagaagcgaaacaggctgcagagaagattcaggcggtatttttaaaatataatcagaaattattatatgaaaaagcagacaggtatgagcaggcaaaaatcagactggaagacgcagaaacacagcaaaaagagcaagagaagaaactggacgggtgcaggcagaatatagagaaactcaaaacagaacatcaggaactggatgcgaaacgtgagtctatggaaaaagaacgtgaatccctgaataaaagtgatgctgtagcattaaaacgaagagaatcagaactggcagcagaactggaagtccagcaaaagaatttaaaagggaaaaagcattttcttgaactgaaacaggatcagtacaaggatgcacagaatcagatcaaagcagaagaagacaggaagtatgagaaagaaaaagaactggaggaactcatagaagagatgcaggacgaggcagataccatggcctttgaagaacatgcatttatgaaagacgagctggaaaagcatccggaagagccatataagttcgaattacatcagcagcaatataatcatacaaaagaaaaaatacatgaaggaacagagattcttgtagagacagatcatctggaaagacagaaagatgagctgatcaaagacagagaaaaacggatccgtgaactggatacgctgcagagaaaagtatcggaactggaagctgtattcgtacagacacagaatgaatggaaagaaaatctgtatcagtggaatggtgcgaatcaggaactggtactggaaaaagaactattaagagcattaagcatatttgcagagtcttacgaagagaactctgattttgcagaggtccgtcagaagattgcagatgtgtggattggaaaaaatgcggaggttgaatccgggatttctgcgaatagagcagagaaagaaacaacagaaagagaactggaagaagtaaaagcagaactgtcagaatgggagaatcagaaagaaccacagccggaacgatcagaagcggttatccgtaaccgtcggagactggatgcacttggaattccgtaccaggagttctataaggttatagagttcggaaataatctggacgaaaaagagtgtaaccgtctggaagaagcattattgaaaatgagaattctggatgcgctggtgattgatgaacaatacaaagagcaggtgctgcacttagaacagggctgtgaagatcgttacctgtttagctgtaaaaatggtcagaaagatatccagccggagcgcagtctgttagatgtactggaactgaatgaagaagttaatgacattttctccaatcagcggttgacaggaattcttggaagtattgcgtatgataacgaaagtatgattgcggttgcagaagacggcacttaccggatgggtgtacttgcaggaacagtaaccggagaatatgaggccggctaccttggaacaaaggcccgtgaaaaacacagacaggcaaagattgaagcctgcagacagagaatcgcagaactggaagaaatattgcagcaactggaagaaatgcatcggaagctgtttgaaaggaaggatattctcagacaggagtatgagaatcttccaaaagacacagatatgagggaagcccttcagatgatgcgtgcagaggaaagggcatgtgaacagatcagacgggagagtgatagattagaagagcagattcgtgaactgatcgaaaacgtgaaagagaagaaaaagaaagcactggaaattgcagagtctctgtatctgacctgctcttatgatgtattcaaagaagcaaaaagagcagcagaagaatatggcaggcatctgatcagtctgattgcagcacatgaaatgttcctcagaagcctggagtatctgaaagagagaaaagaacatctggaagatctggatgcagatatggagcagatccggtatgatctgttcgagattcaaaaagaaatacagagaaagacggaagaacagacatcgattcaggaacaattacggctgactgattatgaagaaatcaaagaccgtctggacgcatgcatcaagtggcttcaagtctatccggaaaaactgcgtatgtgtgtaagcagacagacacatgaagaagacgaagtcggacaactgactctgcgtctggaagacggcaggaagagaattgaagaatacgaaaagaagacggcatatttttcagaatgttatgaacaggagaagcgtctgcactatgtggagataccggaagagataccggatgatgccggacatgtacggagttatcttgagtctgacgtaaaggcattggataaagacagtgtgatccgtgatctgaataaagtatattttgaaaacagaggattcctgacggattatcatttgatgcagaatgaattatttgcagaagaagaacagacagaatttccggcaaagcgactggatatttccgccagatatcagggggtaaagatatcattttcaagtcttcttacacatctggaagaagatatcgaagagttggagaatctgattaaagatggtgaccgggaactgttcgaagatattcttgccaatacggtaagccggaagatccgtggaaagattaatgcatccaacacatgggtacaaaagatgaattccctgatgaacgacatgaacacatccagtggtctgaggcttagcctcagatggagaagcaaaactgcagaacaggaagaccagctggatacaaaagaactggtggacttgttaaagaaagattaccgcctgatgagcgaagaagaagcatccaggctttcggcacatttccgctcgaaagtagcagaagcgagaagaaatgcaagagacagtgccggaatgatatcattctatcagattatgaaagatactctggattatcgtaaatggtttgaatttcaattgttctcacagaagaacggagaacgacagaaagaactgacaaacagtgtatttggaactttcagcggcggagaaaaggcgatgtccatgtatgtgccgttattctcagcagttgtggcgaagtatcagggcggcagggaagacgcgccaaaactcatctcactggatgaagcatttgccggagtggacaataggaatatccgtgatatgttccgtctgatgacagagttcgggtttgactttattattaactcccaggttctgtggggcgactgtgatacactggatgcattggcaatctaccagctgattcgtccgggcaatgcgaaatttgtgacggttatgccatatctgtggaacggacataaaaaggaattgttagagcatgaagaagaagttgagcagagaggtatagagcttggaatggcatcagaaaatcactagtacatcgttttcgaaataactacaccattcacttgcctgcgaatccgattgtgcaggtagaaaagcctcggcgtagcccgctacgcctgcgttttttacctgcacaatcgaatccgcatcctacgcgattggtatagttatttacgaaacgatgtactagtaagatagttgaaaaatgcagttaaggatgatatgatgaaaaggttgaatgtcgatgaatgagagtgaacaggaagaacttgagaagataaaaaaagaatgcctggcatattttggacaaagtccggtctggaaaaaagttctgagaggctttcgagaaaaatacagctcttatggaaggtttggcggaaaagtggttttgaagaatctgaaatcacaggacatcgaagaactggagggcttctttggcaagtcttttcatggacagaaaagtgtgacagtgtctgcagagaaatttcggcaggcactggaagtaagccgttacaaaaatatgacaccggaatggctgttagaaaactttttcgaagaaccattgcttggaaaacaggaacaaaaacttttaaggcaacaggaaaaagaaagaatatgggaaaatttccgaaagagttacgaaggaatgccgatagagacggtggaagaatcgttggaaaatatcgtcaaagacagtgagaatcgggaacttacagaatgggagcgactgttgcggcttggagcagaaatgtataatcatttaccatatcgtcaaagtgagaagctgtatctggctgtatttgcagcgatgctgacaggaaatccacatgcatttgacaatggaactgccgatggcaatttcctgtatcagattatccagatggatatggagagcagaagcattaagatagaggcatctgagatttttccggcttacaagcgccagaaaagttacctgatggcaggcattatgctggatgacatctcaaattatgcgatgctgtatcaggtacaggcagtcaaaaaagatggaagtattcatcaggggatggcgggatttgcaagggaacagcatattgtacaggtgccgcttgcagtgatatcagagtgggagttgcttcgttgttcacaagatgaaatctacattgtggaaaatccttctgtttttgcagtattgtgtggaaaagaaaaagagaaaaacacaagaagagcgtatatgtgtatgaacggacagccgagactggccggactgatggtactggagcttctggcaaagtctggaaccaaagtgtattatgcgggagatctggatccggaaggtatactgatcgcacagaagctatcacggtattataaaggagaatttcattactggcatatggaaacggaagattatgagaagtgtaagtcagaggaagttatatcgccgaagcgaatgaagatactggagcggattacggatgatagattgaaaccggtggtggaaagaattaaagcgtatgggactgccgggtatcaggaaatgttgatggaggagacaaaatgatgatcagagacgcaaaagaaaaagatattccgagaattttaaagctattagaacaggtactgcaaattcatgcagatataagacctgatatttttatcccaggtacgacaaaatataccatagacgaattgagagagattttaaaaaataaagaaaagccaatatttgttgcagtggatgaagcggatgtttgtgtggggtatgcattttgccaattacaggagcagcctgtttcaaacaatatggtaccatttaagtcgttctatatcgatgatctgtgtgttgatcaagaagcacggggccagcatattggtgaaagtctgtttgaacatgtcaaaaaagaagcaaagcagcggggctgctatgaagtgacattgaatgtatggacaggaaatacttcagcagaaaaattttatgagagaatgggaatgcgaacgaaaaaaagacaaatggaatacacggatctgtaaaatgatagcttgaaacattagattgtgagaagaaggcaaggggaaatgaaatatgaccacaaatcatctgattttagatttttcacatgtatattgtgacgagaagattccaaagaatgataaagtgcattggctggactgttctgatattacggaatgtgatttatattgttccaaacgtgcagaagaagaaatcagagcgagaattgcgccctatggtattcatggaattcattttctggattctggaaattatcactatgtaacaggcatcatgacggcgttgattaaacagaaattttctttaattttacttgaccatcatacagatatgcaaaaaccgatgattgagcaaatgacaagctgtggtgactgggcaggaaaagtattaaaaacaaatccatggttgcagcagttgatattgattggaccgcaggaaagcgatattttgcagatatatcgtgaaaaagaaggtctggtgtctggtgcagaattgcaggaaaagctgattactttttctgaagaggagattcaaagtgtagacggtgaaaataaaatttcggggataaaaaggaatcttccggtttatatttctattgacaaagatattttggatgaagaatattcagagacaaattggagtcagggaaaaatgccattacctgtgctggaacggctgctgatgccatttttaacaagcggaaatatcctgggcattgatatttgcggggaatgtcaacagggaataccattgccgcagtacctggaagcagaggaaattaatggagaaacaaataaagaattgtttgattttctgatgcattactgtagaaatttttgaggactggcatcggcgacatacaggcattgcgattcagaattttccggaaggagccactatttccatgccgctcagagcagaaggagaggggaaggggatttctaggcggcgtgttatccggtgtagttgaaccggtcggattcagtttgatgattgatggtgctggatgtggcacttgggtaaagtaaataagggaattaagtggagccaaccagaacagtggaattcgaataaaacgaatcgatacaatataaagctcttagctgtgggtcaaaacgcatagctaagggcttttgtcataccataaatcggaaaaattgtatcgctgtggtattttgcgtatgaaaaataaatataactgttcagagctaacctccaaaatgctacgcatttcgtcggtgtggcgtatccgccaaataaaatttcaaaaacagtcttaaaaatgcaagcattttttaccttttttgaaattttgcttggctctgaacagttacaaataaatgtataatttcactttctgtttgacggctttttgtgtatactaaaattagcggaaattaaaaagagtttctgacgacgttgcaggaggaaagtttatgggaacacgaaaaaagattttgtcattgctgctgatgattgtattactacttccggttggaatggggattcatgtggaagcggcagctgaaacgaaacaagtagacgttttgtttacacacgatacgcattcgcatctgaacagtttttcgacaattgtagatggggagcaaaaggaagtcggcggatttgccaaaataaaaacgctgatcgacgagaagaagaaggtaaatccggatacacttgtgctggatggcggcgatttttcaatgggaacgctgattcagacggtctatgatacagaagcagcagagctgcgcatgcttggttttctcgggtatgatgtgacaacctttggcaatcacgaattcgattaccgttcaaagggtctggcgaatatgctgaaggcagctgtaaaatccggtgagacattgcccgtgctggttgtctgcaatgtggattgggacagtatggaacaggctggactaagtgacggacagcaacagattcagtctgcttttgaaacatacggcgtgaaagattacgttgtgcttcaaaagggaaatgtaaaaattgcagtggtaggtgtctttggaacagatgctttgaaatgcgcaccgacatgcgaactgatctttaaagatccggtggaggccgttaaggaaactgtagaggaaatcaagaagaatgaagatgtcgatatgattgcctgcgtgtctcatggcggtacgtgggaggatgagtcgaagtcggaggatgaaatccttgcaaaggcggtgccggatattgatctgatcatcagtggacattcgcatacggagctgaaaacagccatttgccatggcgatacatacgttgtttcctgtggtgaatacggaagaaatctcggttccctgtcgatgacacagaaagcggacggccgatgggagatgacagattatacgttgattccggtgtcttcggatgttgagccggatcaggcaacgcaggaaagaatcaatgcattaatggatacggtggatacgaactaccttgctgattttggttatacaagagaagaagtgcttgcagaaaatgcggtggaattcaacagtctggatgaaatggggacaaagcatgaggagctgaatctcggtgatatcatgtccgatgcgtatatttatgctgtcgaaaattcagagtattttgatggcgatccggtagatgtagccgttgttccaagtggtactgtgcgagacacttatacaaagggcaacctgacagttgaagatattttcaattcattttcattaggtatcggcaaagacggtgtacccggatatccgctgattgacgcttatctgacgggaaaagagctgaaactggtagcagaagtggatgcttccgtttctgattttatgacaacagcgcggttatattgcagtggtttgaattttacttacaatccgaatcgaatgattttaaataaagtgacggactgttatctgacgcgcaaagacggggaaagaatcgaaatccaggatgatcagctgtatcatgttgtgacagatttatataccggacaaatgcttggatccgtcatggatctgtcgtacgggttattgtcgcttcagccaaaggacaaggatggtcatccgattgaaaatctggaagattacgcaattatggaaggtgacagagagttaaaggcttgggacgcgattgccagatatatgcagtcttttgatgatacggatggggatggcattgccaatgtacctgagtattatgcgacgatacacgggcgtaaggtggtggatgacagtaaaaatatcatagatcttgtgaagcatccgaacaagttctctgcgatcattatcatgatctgtctgattgttgttgtcatcattgtgcttgtgatcgttctgatccgaaagctggttcggaaagccagaaagtaacataatatcgaagagacgacatccatatgaagtgacaggagggtaaagacaaatatgattatttcaaatcaacaggacaatgagatggagcatttaaataaaaggattcagacagtggctgttcttggcgccggtgcagtgggctgctatttaattgcgggccttgcgccaaagcttggtgaaaacctctggattatcgcagaaggcagcagaaaagagcggctgaaaaaggaaggtctgacaatcaacgattgtcagctgtcactttgcgtaaaaacatctcaggaggctaaaggtgccgatcttctgattgtagctgtcaaatacggcagtcttgaaggaagtctggatgccattgaacagatcgttgatgatgagacgatcgtgatgagtgtgatgaacggtgttgacagtgaagagatcattggccaccggatcggcatgcagcatatgatgtattcgatgatcaaaatcgcatccgagcgcaccggccattgcgtccgttttaatccggaagtgacggagggggtttattttggggaggcggacggcagcctgtcgtggcgtgttgcggcgattgagaatcttttcaatgattccggtgtgcgattccatattacagaagatatcctcaaaaaaatatgggcgaaatatgccctgaatatcagtatgaatctgccgcaggccatcattggatgcggtctgggcggttacagagacagtgcgtatgtgatggatatcagtacaaaattaaaggacgaggtagtggcagtggccctggccggcggcatcgatatccgggaggaaaaggcggcgagttttgacagcaggacggtttcgccgaaggcccgcttctcaacacttcaggatctggatgcaaagcggcatacagaagtggatatgttttcgggagtgctcgtccgacttggaaagcagttgggaattccgacgccatacaatgcattggcactggatatcatcaaggcacttgaagaaaaaaatgacggcaggtttgattatcaataacccggggaggaaatagaaaaatgaaaaagagagtaatcacagggatgatgacagcatcggtgatagtaagtctggcaggctgcggtgcaggtcagaaggagaccgtggaaagtacggcaccggcaacaatgacagaaacagttgcggcctctcaggtggagacagctgaagtgaccgagacagagacgacggtgcaggcagaccgtgcatcaagaatcaaagcctatcaggcagcattggaaaatatttatcagaatcatattttgccggacggatcagaattgagagatgacatcagtggtgagatgtcaggcaacaaatttgctgtttacgatgttgatcatgacggcagagaagagcttgttttctgctatacggcaacaagcatggcgtcaatgacagcgaagatttatgattacgatgaagcaagcggtgaattgtatgaggaactttcgcagtttccgatgctgacattttatgacaatgcaacgatcggagccggtatttcacataatcagggctatgccggtgagttctggccgtatacgttttatacttatgatgcagccaatgacagctatcgggccgaatactttgtcgatgcctgggataaatctttatccgatgtcaattataacggggaagccttcccggatgatgcggacaaagacggtgatggcattgtgtattacctggatgcaccggatggcagtgaaaccggtgagccgctcgacagggatgcttttgatcaatggatcagtgagaatgtcggcaatgaagaaaacattccgtttctggatttgacagaggatgcaatccgtcagattcagtaaaaaagaataaaacatacatgcgctgagcgtgtttttacagaaacagaaggtgcgtaagggggaatttgggatggagcagagagaaatcagaaaattggtcaatagacaacgcaggtttttttatacaggaaaaacgcagcatatggcatttcgtgagatggctcttagacggctgcagatcagcattatggcccatgaggatgagatcaatcgggcactcagactggatctcggtaaaagcgcatcggaagcgtatatgtgtgaaaccggcatggtgctggcagagatcagctatatgctcaagcatatgcggcagtttggcaaggatcagactgtgcggacaccgctggcccagttcgcgtccagaagcttcagaaagccgtcgccatatggggtgacactgatcatgagtccgtggaattatccgtttcttctgacgatggagccgcttgtggacgcgctggcagcaggcaatacagcgattgtcaaaccgagtgcctactcgccttttacgagtgagatcatggcgaagatcatatcagaatgtctgcctcaaaaatacgttgtggttgtgaacggtggacgtaaagagaatcagtggctgttaaaggaaaagtttgattatatcttttttacgggcagtcaggcagtaggtaaagaagtgatggcacatgcggcgaagcatctgacaccggtgacattggagctcggaggcaaaagcccgtgtatcgttgacgagacagccaatataaagctggcggccagacgtattgtctttggcaaatatctgaactgcggtcagacctgtgtggcaccggattatgtgtactgcgcggcttcggttaaggatgcacttgttgacgagatgaagaaacagatcaggaagcagtttggagacgatccgctggcgaatgccgattacggccgcattgtcaatgagaagcatttcagacgtctgattggactgatcgatccgacgaaggttgtcgcaggcggcgagtgtgatagcacactccttcagattgcaccgacgatcatggatcaagtgacatttgaagatgccgtgatgcaggaagaaatattcggaccgattctgccggtgatgacgttccattcactggatgcggtgatcagccagatcaatcgcagagagcatccgctcgccttgtatatgtttacggagagcaaggccaatgccgatcgtgtgatgacaaattgcggctttggcggtggctgtatcaatgatacggtgattcacctggcgacaagtgagatgggcttcggcggttttggggagagcggcatgggggcttaccatggcaagaccggtttcgatacgttcagtcattataagagtattgtcgacaagaagacatggatggatcttccgatgcgctatcagccgtataacaaagtctttgattttctgatccgactgtttatgcattgatggctgcgttgaaaccggattttcaaaagagatagacttgtacttatgcatattatttgatatgataaaagacgatttaatttagttgtgcgccgaattaaagtggtggcggcaacaagactggatggaggaaattatcatggttattgcaaaaagaatggagccgcttgttacaggaagctctattatccgtaaattattcgaagaaggcaaggaaatggccaaaaaggtgggcgctgagaatgtctatgattacagccttggcaatccaagtgttccggcaccggacgctgtcaaatcgtcgattatcaaaatcctggatacagaggatccgctttttgtgcatggctatatgagcaattccggctacgaggaagtcagacaggctgtggcggacaatctgaatgagcgtttccagtggcaatataaaatggaagatatcattatgacagtcggcgctgcttccggtatcaatgatattctgaatctttttctggacagcggtgatgaagtggtcgtctttgcacctttctttggcgaatacaggaactatgtcatcaccgcaggcggtgctttaaaggcagtgccggcagacacagagactttccagattaatattgacggattggatgcagtgattacggagaagacgaagctgatcattgtcaataatccgaataatccaaccggcgtcatctattcaggagacactctggatcagctgcagaaggcactggagcgggccgaagcgcgcatcgggcatccgctgtatgtgatttcagatgaaccatacagagagcttgtttatgatgataacgagctgccgtttatgccggcccatgtcaaaaactgtctgattgtttactctttcagcaaatcactttctcttccgggagagcgtattggctatatcgctgtttcaccgaaaatggattattatgaagaagtaaaaggcggactgatcacaacgaacagaatcggcagcgtgaatgccccatccctgatgcagcttgtcatcaaagagtgcctgaatgagcgccctcagattgaagtttacgatcagaacagaaagatgctctatgagcatctgacagcgcttggctttgaatgtctgaagccacagggggccttttatctttttgtgaaatcaccgattgaagattatgccgcttttgtagaagaaggcaagaaacagcatattctgatggtggatgcctcaagttttggatgcccgggctatgtgcgtctggcttattgtgtatcccctgagatgatcaagcgttctttcccggcctttgagagattggcagaagcatgcaaggcaatgagatagaggaagaggtgaccgagatgaaagcatggcaggataaaattcgttcagttgtaccctatacaccgggagagcagccgaacagaccgaatatgatcaaactgaacacgaatgagaatccataccctccggcaccgggtgtgcgggatgtattggatcattttgatgaagacagattgagactttacccagatccgacagcgggaactctggtgggcgcactggcagattattatcatgtaagaaaagaccaggtatttaccggtgtgggctctgatgatgtgctggccattgcctttatgacattttttaattcagataagccgatctttttcccggatattacttattctttttatccggtatgggcggatctttttaaagtgccgtatgagacaaagccactgaaagaggatttttccatttgtccgcaggattattatccggccaacggcggtgtgattttcccgaatccgaatgcaccgacctcccactatgaggacttatctgtgatccgagagattctggaccacaatcaggatgtgattgtcattgttgatgaagcatacatagattttgccggcgaaagtgccctgagtctgttggatgactacgaaaatctgctgatcgtgcagacattttcaaagtcacgttccatggcgggaatgagaatcggttatgccatcggtcatcctgagctgatcaaggccatgaatgatgtgaagtactccttcaattcctatacaatgagtcaaactgcactggctctcggtgtagaagctgtcagagatgatgtttacttcaaagcatgcactgcgaagatcagagcaaccagggaaaaagcaaaacaggcatttacagaccttggatttacttatccggaaccgggtgccaacttcattttcgtcactcatccggactatcctgccaaagaactctttgcagcccttcgcgaaaaagatatctatgtccgctacttcgataaaccgcgcatcaacaattacctgcgagtcaccattggaactgatgaacagatggaagcattatttgcgttcctaaaggaatatatgaatcgataaattaaatgtagcgtctaaaaaggagaaacaaaatgtcacaaaaaacagtcaccgtttccgttcgccggcttgtggagtttattctcagatcgggagacattgataccgtttccggcgcatttggagaaatggatgcaatgcagcagggtggcctgatgcatcgaaaacttcaaaaagaggccgggccttcttacagggcagaggtgtctctgaagcatacgacagaaatggatgagacgttggcgattactgttgagggacgtgccgatggtgtcataacagaaactgagatggcagcggatgaaagcggcgagctgggactgaaagaagttgtgacaattgatgagatcaaaggtacttatagaaatttaaggtatatcacagagcctgtgcccgtccatctggcacaggcaaagtgctatgcctttttttatgcagaaaaagaggatttagaggaaatacaggtccagatgacgtatgtgcatttgaagacgggaaaagttcagcgattcaggaaaaaaatgacacgaaatgagctggaagtatggtatactgaactgatagacagatttgcggtctgggtgcgtcatcagatagcctggattaaaaaaagaaatctttctattggtgccggcagttttccttttgagtacagagagagtcagaaaaagctcgtctcaggcgtttatcagacgattctgagacatcggcggctttttgtagaagcaccgacaggtaccggcaagacgatttccgccatttatccggctgttcaggcgatgggaaatgggttgtcagagacaattttctatttgacggcgaggactattgccaggactgttgcggaagatacattcggacttcttcaggataagggacttaccatgaaggtgatcaccctgacggcaaaggagaaaatctgcgtgctggataaagttcagtgcagtccggagtactgtccaagggcaaaggggcattatgacagaattaatgaagccctttatgatctggtcacccaagaagaccggatgactagggagtgcatcctggcttatgccgacaaacatcaggtttgtccctttgagtttcagttggatgcggctttattcgcggatgcggtcattggtgattataattatgtgtttgatccgaatgtggcgctcaaacgttttttcagtgacagaagcggggactatctttttctgatcgatgaggcacacaatctggtggatcgtgccagggaaatgtacagtgccgtgatgtcaatgactgaattgacccatgcccgtcacgcagtggaagataaagctgtggaccggcgactggtcacttatatggatcgttcgatattggccatgtctgcgcttcgggagtcttcagacgagtcctgccagctgatggggaatatcggcagtctgatcgtttacctgacgaagctcagtgagcagctggaggaaacactgaaggagggcgttactgcgccactcagggaagttctgatggaattttactttgacattcgacgctttatatgtgcctttgaccggtcggatgaccgctatttgatctatgcgcttcgaagtgaggacagctttaaaatcaagattttctgtgtggatccttccaaagatctgggagaacgtctggcaaagggatgcggagccgtatttttctctgcaacgcttctcccggtgcagtactacaaggaaatgctcagtgatacagcagcatcggattacgatctttatgtggattcaccttttgcggaggaaaaccgtctgcttgtagcggcaacagatgtaagcagccgctatacaaggcggggtagaaaagagtatgaacggatggctgcatatatccgggatattattcgcggcaagcatggcaattatatggtctttttcccgtcatatcagcttatgaaggatgtttttgaagtttttacggaaatggaattaatgaaggcaggccatggtctgcagctggttgtgcaggaatccgagatgagtgaagatgcaagacagaagtttctggatgcttttcaggcggatgctgcagatgcggttattggtttctgtgtgatgggcggtattttttcggagggcattgatctgaaagaagaccggctgatcggtgtcatcattatcgggacaggactgccgcaagttggagaagagagagagcttttaagtcggtatttcaatgagaaatccggcagagggtttgaatatgcttacctttatccggggatgaacaaggttttgcaggcagcaggacgcgtgatccgaacggagaaggacagaggcgtgatcgcgttattggatgagcgatttaattacagtcagtacagaaaaatgttcccgagagaatggcacaattgcagtaagaccagtctgaatacaatcgtgcagcaggtggaggatttctggacagataaagcataggatcagataagagaaaaatattttcaggcagatgagatatttgatatagataataacaggagataaacggaggcgataaagttgaggattggttttatagggctcggtattatgggcgaggccatgtgctataatattatcagaaaacatgacggtgacgtctatatttatgacgtaaaaacagaaccggtacagcggttggcggaaaaaggcggtatcgcctgtgacagtgccgttgatgcagcaaaacattcggatgtgatcattacgatgctgccgagatcagaagattccctgtcagtatataaagaaatactcccggccgtcaatgcaacgaaaatctgtattgacatgagcaccattgatccttccgtttcattgaaaattagtgttatgattcaggctcatggtggacatttcctggatgcgccggttgttaagtcgaaggcggccgcagtgctgggcaatatcggcatttatgtaggcggcgagaaagaaatttatttccaggtgaagccaatcctgcagtatatgggatcaaatgtactgtatatgggatccagcggcaagggtatcggtatgaagatctgtcagactacactgctggcacagattcagaatggtgtcaatgaagccctggctatggctgtgaaacagggcattgatgtggatcgttttacagcggccctgtcttttggcggtggtcagaatgcttattttgatgaacgtcagatggccatcaggaacaaagattatgcgacgacattttcggtccggaatatgtccaaggatattgatatctgtcgtcggctggcaaagacggaaggagttcaggcagaaagtctggaaggcatcagggaagtctacgaccgggcacttgaggcgggatatggtgataaggattacagttctgtcattgatatggtctttgagaaaaactatgtcaaatataaacctaaattataaaagcgattgattgttgaaaacgtgattataaaagtattattcaaaagtgaatattgaatattgtatacaaattgtacaaaattaaaaactataggaaactatgttgaaagaaaaagaaactattgttaaaatattgttaatcactcggggaggagaatgattaactaaaataaggaggaattgctatgacaatcacaatctgtattggaagctcatgtcatctgaaaggttcaagaacaattattcagaaactggaagaattgatcacggagcgtcagttaaacgacaaaattgagctcaatggttcattttgcatgggcgaatgttcaaatggtgtttgtgtaaagattaacgatgaattgttcagcgtttcaccggagactgtgaatacattttttgaaaatgaagtactcaggaggctttaagggtgggcgtcattggatttagaaaggcaaagtgcaaggactgttataaatgtgtccgtttgtgtgaagtaaaggccattcgtatcaaggatgaacatgcacaatttgttgcttcagagtgcgtggaatgcggccagtgtctggaggcctgtccgcagaatgcaattacatttatcaaggatattcagtggatcaagtccatggtgaagaaccgggagaagactgttgtatctctggcaccggcgtacctgggtgtatttggagatgcagatccgaaccagatggcggcagcccttcatcagctgggatttacatatgtacatgaaacggcagaagcagctggatatgttgtgcaggaatacatgaattattgtgacagatctgataaggatgcggttcttctgacatcatcatgttctgccatcaacaacttgattgagaaatatcatccggatatgctgccgtatcttctgcctgttgtgacaccggctatcgcacatgcaagaatgctcagagcacagtatggaccggatgtgaagatcatctatatcagtccatgtgtctcagatggaggagatgcattgaaggatccgagaacaaaaggcatcatcgatgcggtgttggattttgcaacactgcgtgaatggctcagaaacgaacagatcaagattccggaatgtccgagcagccatatggacagtatggatccaaaggtgatgcgtctgtttgctgtcagtggagggattctttctgctattaaggctgcaaaaggccgtaagtacaagcacaagcgactgtatgtcagcggtatcggaccatgtgaagaactttttgagtgtatccgtaatggagagatcaagaactgtgttattgagttgaattcatgtaccggcggctgcatcaacggaccgatgaccggaggcaagaagcgtgaccgtttcagatccaagatcagtgtcagccagaaggtagatgagcatgaggcaccggaattaccgccgctgccggaaggtgtcagcctttataaggaatatacggcgcgctgcgaaaagagaattgtcccgtcagatgagcagatccgtgcaatcctgtccaagattggcaaggattcaccagagaaggaattaaactgcggtgcctgcggtttcccgacatgccgtgataaggccattgctgtataccgcggcaaaacccaacttaccatgtgtattccgtatatgtatgagcaggccaagggtatgtctgatattattctggctgtgacaccaagtatgatcattgttgtggataaggattattatatctgcgaattcaacaatgcagcagaggtcgcttttggtgtatcccagcagaaagcgctgggacatccggtatctgaatttatttccacagaatattttgaaaaggttttccgtgagaagcgaagtattattaatcagcgtgtagattatgatgcctatcatattaagacaatgcagaatattatctacatgcgtgagcaggaaaaggcccttgtgattatgcgtgacattacggaaggtgtgcgcaagcaggagcagcttcggaaggtgaaactggacacagtggctatggctcagaatgtcatcaacaaacagatgatggtggctcaggagatcgccggtcttcttggtgagacaacagctgaaacgaagtcaacccttcgcaaattgagagacacactgatggacagtgatgaggatataaagatatgaatgtaagtctggatgtctgcagcaagagtctgaacaaaagagaagaagaactttgtggtgatactgtcgagatcgttaagactacggatgctgatattatcattctgtcagatggtatgggaagcggtgtaaaggccaatatcttatccacattgaccaccaggattctcggtacgatgctgaaaaacggcgagaccattgaagactgcgtggagaccattgctatgacactgccaatctgcaaagtaaggcaggtggcctattccacatttgcgatccttcagattttcagagatgggcgtgcctatctggtggagtatgatacaccggcctgcattgtgatccgtgacggtcaaaagcttgatattgagcatacagagcgggagctttcaggcaagattatcagagaatatcgttttaacattcaggaagatgattattttgtgatgatgagtgacggtgtgacccatgcaggggttggcggtctgtatggttttggatggggacggacgagagtcggtgagtttatccaacagaggttcaatgatacgaagatgacggcagcacgcctggcatcctatgtgatcaatgagtgcagtcagctgtaccatcagcgaccgggagatgatacaaccgttgttgtggcgaaagtgacagcacgaatggacctgaatattttcacaggtcctccgacaaagcgagaagatgacgaaagtgctatccgtgaattcatgcgctcacaggggctgcatgttgtcagcggcggtacaagtgccacaatagcggcacgtgtattaaacaaacatataaaagcatccctcatttacgaagatccggatattcctccgacagctgaaattgacggactggatcttgtgacggaaggtgttctgacactgaaccgtgcggtgagtatgatgcatgaatataatgaaggacggcaggatcagtcgtttttcaaacggcttgatgagaagaatggcggttcgcagctggcaaaactcattattgagagatgcacgcatctgcatttatttgtaggtgaagcgatgaatccggctcatcaggcagctggccttccatttgatctcagtgtccgcatgcgtttggtggacaagatcgttgaggaaggcaggaagatgggaaaaacagtcagtgttaaatattattgaggatgatatgtatgaagacaacatttattactgatattaataaaattaaatttgaagtcaatacagaagttgcccggctggcttttgcaggagaattggacgagaaagccaatgagattccttacaagctgattccgggacgtacaccgcactacagatgctgcgtttacagagaacgtgagatcatccgtgaacgtgtacagctggctatgggacgttcagccatgtccggccagaagaacaagaatattgtgcaggtgatcgaggctgcctgtgaaggctgtccgatcaacagatttaatgtgactaacaactgtcagatgtgtatggccaaaaaatgtcttggcgcatgtaattttggcgccatcaagtttgaaggcggccatgccgtcattgaccataagaaatgtaaagagtgcggtaagtgtgcagaggcttgtccttacaatgccattgccgacctgatgcgtccatgtaagcgcagctgtcctgtagatgccattacaatggatgaggacaacattgttgttattaatgaggagaaatgcattaactgcggtcagtgtgtgatcaactgtccgttcggtgctttatcagaccgttcatttatggtggacgtaatcaaactgatcagcagcggcgcaccggtttacgccatggtggcaccggctattgaagggcagttcggccctgatgtcagtgttggtatgatccgtgaggctgtcatgaagcttggcttcagagacatgtatgaagtatctctgggcgcagattttgtatcaaagaatgaaggacaggagcttctggagcactatgaagccggcgagaaaatgacaacatcctgttgtcctgctttcgtttctctgatcaagaagcattatccgcaggtgctcaagtatatgtctacaactgtttcgccgatgacagctacaggacgtctgatcaaagccatgcatccggatgctgtatgcgttttcatcggaccatgtattgccaagaaatccgaagtcattgattccattactttcggtggtgcggattatgccatgacttatgaagaactggccagcatgtttgaggcgaaaaatattgatcctgaggaatgtacagagaccctgcagcagggaagtaagttcggcaagcagtattctgtatccggcggtgtaacagcagctgtccttgaaacattcaaggaagccaacaaagaagttgatctgaaggtaaagacctgcagcggtgcactggaatgcaagaaagcactgatgcttctgaaagtcggcaagcttccggaagactttattgaaggtatggcatgtgtaggcggctgtgttaacggtccggcaatgcttggtaaatccagaacattcctcaaggacagaaatggtcagattgccaaggcggatgatcgaggtgttcttgaaaatgttgcacagtacgatgaatacggcattaatatgacgagaaatcatcaataaatatgaataaaatgcgtccttatgtttcgataaggtgataaaaaagaagactatttataaataagtagcgtgcagttataggatatctgttataagattccgaatgagaaattcaacacaagtgtgtctgaatattctcattcggaatcttattttttttgatggttttgactgaatagatattgacgaaatgatgtttatatactaaaataatgataacgattactatttataaatatttactgatgagtatagaaacagaggagattagtatgccgggattgaagtacagcagacagagagagtctattattaattgcctgaaagggcggaaggaccacccgacagcagatatgatttacgcgtcggtgcgggaagagtatccgaagatcagtcttgggacggtttacagaaacctttctttattagtggatcagggagaaattctccgcttttcatgcggggaaggacaggatcattatgatgcagatacatcacagcattatcattttgtatgcaagaaatgcagggctgtttcagatttgcatatgccaccgttggaacatatcgatgtgcttgcgaaggatggttttgacggtgagatagatggtcatttcgttctgttttatggcacctgcgggaaatgcaaagaaaatgaaaaaaatagttgacaaggcgggaaaagtggtgtaatatacagataacagtaatgattactgttttgaaagaaacatattaatcgtaaccgttccgtataatggggaagcagtcagcgggcatatcgctgaaggcagttagtatggattggaacggttacaggatattataaagtatgaaaaggagattataattatgaagaaatgggtttgtacagtatgtggttatgtttatgaaggtgaaaacgctccggaattttgtccagtctgtaaggcacctgccagcaagttcaaagaacagtccggtgacaagacatgggctgcagaacacgttgtaggtgttgcacagggtgcgcctgaagatatcatggctgatttaagagcaaactttgaaggtgaatgttcagaagttggtatgtacctggcaatggctcgtgtcgctcacagagaaggctatccggaaatcggtttatactgggagaaggcagcttatgaagaagctgaacatgcagcgaagtttgcagaactccttggtgaagttgttacagacagcacaaagaagaaccttgagatgagagtagatgctgaacacggtgcaacagaaggtaaattcgatttagctaaacgtgcgaaagctctgaacctggatgcaattcatgatacagtgcatgagatggcccgcgacgaggctagacacggcaaggcattcgaaggtctgcttaagagatactttggctaatcacaaagccgcatagaataaggatttttatgagagggaatcactttcgtgattccctctttttttaacattttccatggaaaagtgcaaacgaatgtgtcaattttgggctcttttatacctcaaaatagtctaaatgtgtccttaaaaaatgtgtcccttgtattaccaggataatgaaaccatccatttgaggacagtcagagagacttcttcataggtatcgttgaagaggccaaaaatcaaggtcacaataaccgccaattctaatgtgggacttatcgtttttgtagtttttagtataaggatacggctcatcaatatcgttgcgtaaagaagtgaaattatcataatcatcatgggcataacaccaggtgatgtgagatttttggactttgattgcctttgtgatcatattctttgcgtttttcacttcacctttgattaggaaatcctcatattcatatgtttttatactggaagttcgttttacctgattaataaatgattctgccattgtagtcacttgtccttttaccatgaaaagtcaattctgagggttgtatcagtgccatctttttcaagcttttttctacataaaaatccctctgtttccttatagaatggcacatctaccttttttacggatgctttgaaaccgagctgtttcaatcccttttcaatttcgcttcttaaatcattgatacaatttgagtaacagacatctttaacaccgaaactgccggcacctatatcatctcgaggaaggagtttatctttgattggaagaaggcgccaataatttttatcatagccagcataggccaaatagcctgaaacagaatacttaccggcattattttggctgcgagccaagcgtttcaattcttcaagaacagctttaacatgaaagttcagccagtactgtctgcctgctatttcttctttcgccagctgtgggcctttgctgctgcgtaattcatctgcgaatgtcataggtgatacctcccggatataaaaatctaaatgataggtttacttgttttctatgctgctattgtatcatttgagttagaattgggtggtcccaggtgggtaaaaaaacagtgatttggaacttgtaggcggccgtgataatcgctataataatgaaagaaataaacgggcgtttcacagtgcggccgtgtcaaaggagtcaatcaatgataattacaatactacttgcagggctgcttcttatacttgctgcaggcatcaggtgtggctttgcgctggatgatttaatacggatggcagtcaatggcataaaaaaggctgtgaatgtcctgagcgtgctggctattgtcggtattttgacagcgatgtggcgggcagatggtacgatcgcttatatcgtatcatccgcagcggggttatttaagccatctattttgatcgtgaccatttttttgatgaattgtcttgtttcttttatgacagggacttcatttggaacagctgcaaccatgggtgtgatcagtatgacgattgccggtacagcaggtgttaatccggtaatcagcggtggcgcggtgatttcaggctgtttttttggtgacagatgttcaccgctttcaagcagcgcaattctcgtggcctctgtgacagagacgaatctgtttgataatatccgaaatatgttaaggactgcagcagttccttttgccctgacgtgtatcatctatggggcgattggactttgtggcatcaatcaggttgatgccgcttccatatcggatgtttttgcaaaagagtttcagctgaatagatggatgattttgccggctgttattgtgcttggactttcaatgctgcgtgtcgatgtgaagaagtcgatgacgctcagtattgtatgtgcagtcatcctttgtgttgtgtttcaacacagatcagcagcggaaattatccggatcatgctgacaggatacagggccggggatccggtggctgcgcagatgatcaatggcggtggcctgctatcgatgaagaaggttttgatgattgtctgtatgacatctacttattccgggattttcagtggcaccggaatgttggatggcataacggaatatgtaaaaacaatctctcaaaagacgggaagatttttatgtatcgtgctgctttctgttgttacaagtatggtcggatgcaatcagacaatcgcgatcatgatgacagagcagctgggctgtgttttgtataaagaacaagaaaattcgcagagagcagttgatctggaagattctgccgttttgatttcggcacttattccgtggtccattgcgggagccgtgccgtcagctacgattggtgcaccggtatattgtcttgcagcggcatgctatctgtatttaattccgatttgtcgactggttagaaaaaagaatatctttccgggatgcaacaattaagaataatataagaaataagtcagtcaatcgtccttgacagaagatgcaaaaaaaattacaatatctattatacatggaatttgctcccaattccgctgaaaataaggatgggagcctttttatcataattggagtataaattccgcctgtggtaaacgctccgcatggatgcgcagcgatttttaatggatatttagtttgatcattgagttttgtctgcacatgcagacagatagatttaggaggagacgacaacatgccgattaaaatacaggatgatttgccggcaaagtccgtgttggaggatgagcacattttcgtgatgacggagacgagagctttgtctcaggatatccgtcctttgaagattgtgattctgaatctgatgccgacgaagattgagacagagacgcagattctgagacgtctttccaatacgccgctgcagattgagattacgcttttgcagacagcgacccatgagtcgaagaatgtatctgaagagcatatgattgctttttatcaggaatttgaccagattaaggatgagaattatgatggtatgatcattaccggtgcgccggtggagatgatgccatatgaagaagtggaatactgggatgagttatgcgagattatggagtggagtaagacacatgtgcattctaccttccatatttgctggggtgcccaggcggggctttattatcattacggtattccgaagtatattctggacaagaagatttccggcgtattttcccataaagtgctgaataagaagtccagactgttcagaggttttgatgatacattttatgcgccgcattcccgccatacggaagtgagagccaaggatatcgagaaggtgccggaactgagaattatggcggcttccgaggaggccggtgtttatgttgtgggcagtgcggatgattcccagttctttatcatgggccattcagagtacgatgtggatacattggcgaaagaatatttcagggatgcagagaagggaatgaatccggaagtgccgaagcattatttcccggatgatgacccgacgaagcagccggagatgaagtggagtgcccacggacagtggatttattctaactggatgaattattttgtgtaccagacaacaccatatgaattgaagaatggtgtttttgtacctgtagaatgatcaatacagtaaacttgtgaaatgagtgacaggtaagtgtacaacggcagttatgatgcatgatgtaccatataaaaaggatgattttatgacggaagattataagggactatctgggagtgaagtcagccagagagttgaagcgggaaaggtcaataccaccactaacagtatatcccgaacgaagaaagagatttttcgggcgcatttatgtacgttctttaactttctgaatgtttttctcggtgcacttgttctgatgacaggacagattaagaatctgacttttatgtttacgattattgccaattcagtcattggtattattcaggagttaaaggtcaagagtcttgtggataagttgtctgtgattacagcctcgaaggcgacggttatcagggacggcacgaagaagcagataccgctggatgagcttgttgtggatgatgtgatggtgctggaaagcggtgatcagattggtgcggactgtgtggttctggaagcccagggcattgaagtcaatgaatccatgattaccggtgaatctgtggctgtgaagaagcatgaaggcgatgagatgttgtcgggaagctttcttgtggccggaagcggtgtggcaagggttattcatgtgggcagtgagaattatgctacgattctggcagccaaagccaaagacaaaaagcgtgccacatcggaaatgcaggattccatcggcaggattatcaagattgtcggtttcctgattgtaccggttggtatattgcttttcctttctcagagagccattgagggaaccaccacatccgatgccattgtcaacaccgttgccggtgttatcggtatgattccggaagggctggtacttctgaccagtgtttcatttattttgggtgttggccgtctggcaagaaagcaggcattggtgcaggagatggaagctattgaagcactggcccgtgtgaatgtgctttgcctggataaaaccggtaccatcactaccggtgatttggaagtggtggaagttgtgccttgcggtactatgtcggatgagaagatcagagaggtcatgaatgaaatcacatttgcattcaatgatgtcaatccgacccagcaggctttgatgaattattttgaaaagacgcagaaatggcagacaacggatctgattccgttttcctctgcgagaaaatatcgtgccattgcctttggcgagcacggagcttatgtgctgggtgcgccggaattcattatgaagaatgatgaagaactgctgaagaagagcgagacttatgcactgcagggctatcgtgtacttttgctggcggagacgaatcagatttcaagtgccgatggtacggtgggaacaccaaaacctgcagcgctgattgttatttccgactgtgtcagagaagaagcaccgtccacatttgcttattttgaagcacagcatgtggcaattaaggttatttccggtgataatccggcgacagtttcacagattgcccagaaggccggtctgaaggatggcgacaaatatattgatgcttccaccttgccggagagttttgatgagctgaaaaatgttgtcaagaactatacggttttcggtcgtgtaacaccggagcagaaacagcgtctgatcaaggcttatcaggcaaataaatcggttgtcggcatggtgggcgatggtgtcaacgatgttctggctttaaaggatgctgactgtggtatcgccatggcggcgggcagtgatgcagcgaaacaggtggcccatatcgtactgttggattcagattttgttcatctgaaggaaatcgtcagcgaaggccgtatgattatctccaacatcgagagagtgagctctctgtatctgacaaagacgatttattcattactgttgaatgtgatttttatattattgggacgttcctatccgtttgtgccgattcatctgacactgatcagtacggtggccatcggtattccaagttttattctggcattggaacagaccgagactgtgacccagagcggcttcctaaagcatgtgcttcgagtcgcactgcctggagctttgaccatggtgctgaatatgctgctgattcagggaatttctattgtacttgggtttgacagcggcatgactgcgacgtataatttgattgtggcaggcatggtcagcctgatggtactgatgcgggtatgtaacccgatgaataagatccgaagtattttgtgcaacacgatgattgtgatttttgtggcttgtgtcattttattcccggatctgttcagcatcaacagtgtattcagctggagaatgatctttattgcaccccttgttatttttacttattacagtatgaagtatctgtcggcaattgttcattttctgttaagaaaacatatttagaatcaggaggccgtcgccacctgtcgaagtctttcggcagtggcggcggtttttatttttttctgtaattcgagcattaaagatatcgctgagtgattgagtcatcagcgttagggaggtatttgtatggatataaaaacttttgcaaaggaacattttgaagaatatcaggcactcatctgcaagctgacgtcaattccggcaccctcacatcatgaggaaaggagagcggcgtttatctgcgaatatctgcatcagttgggatatggccaggcgtttattgatgatgcgaagaatgtgatctgtgagataaaaggcagtgatttggaggcaccggtgcatatttttatggcgcatacggatacggttttccctgatgagacagagattccggttgttgtggaagacggctgtatcaaggcaccgggagttggggatgataccaccaatgtgtgtgcgattctgatgactttgaaatatttatcagaaaaacagattgtgccaaaacaaaccatggtttttgcattgaattcctgtgaggagggacttggcaatttgaagggatgcagagcccttgtgaagcagtatacaggaagaatcggacagttggtttcttatgattgcgggtacaatgcgggaaccgtctgggctgtcggttcgagacgttatgagattcgtattcggactaccggtggacattcctatgcagattttggagcgaccaatgcgattgccgtggctgcagatatgattcatgatttttatgagatagacaccaatacgatgccgggaaaaacgacgtacaatgtaggattgatcgaaggcggtacatcagtgaataccattgctcaggatgtgaagattctctatgaatatcgttcagacagaatgatgggactggagctgatggaaagagaaatgtcagtgattgttgataaatatacagatcgtgaagatgccagagtggatattgagatgatcggggacaggccttctatggggcaggtagacaaaaagaaaatgacggaactgcagaagcgggcagaagggattattttcagaaataccggtgtgatgccgatgttcggaagcggatccacagactgcaatattccgttgtccatgggcataccggccatctgtttcggcgtttatctgggcggcggacagcatacaagagaagaatatgtccgaattgattcactggaaacaggactttgtgcggccatggaaatgatttgcgaggatatgacgaacccgctgtaggaaagggctggtttcttattgacggttgaatatatcgtgttcttctatgaaacgtcgcacacccgtgcgaaatgtttcatagaagaacacgatatatttcaacctgtgaattgagggaaaccaacgctttgataacagcgggattgtcatattctctttggaaagtggacagtcggggagaatgtttcggaaagaaggatatgatgtcagaaggatattatatttctcagatgaaaaagaatgtattgaaatataaattgtaatagtgaggaaaataccgtgaagataaatagaatggctgttgtacaggggctgaatcttgagcctgttccgggacagttaagatatggttgcgggatgactgattttgaggatttttatgacattgctgaatacgtgaatgaaaaagcatatttgggcaatcagattgtttttggcgattatgaaactggggcagtgtatataccttttgaaaaggaaaggaatattgcctatggcggagttgaatggatagaaggttacttttattttttaaaggctgattttagcaaaaagacggtgacgattatgcaatatcggccggattgggactgtaaggaatacttcagtatcggaatggctgaagtagaattgtataatttgcgtattgttgggacaccggcgcatttaatcagtcaggatgaggaaatgcggtgttattatccagagcaattttcaattaagctttcagctcgggaaagtgtgattgaaattgtggacaatcatatctattgcagctgttgggaggaagaaggcgttgctgagtgtgagatcacagaagactataaatattatgaaaaactgatcgtcagaaatagattcggtgatgtgatgtcagaggaaccgggggcattgacgcggctgccgaatggccagtggtggctgtcgtaaaaggtgctgtggttgtattagattccatgcaaggggaatgccgccggtttctccgattatgagtgaataggtttactgaatcaatattaggttaggttgtaataggctgcataaataccatttttatcaagcagtgtctcatgtgttccgcgttcggcaatgccgttttcagtgaggacaatgatttcatctgcatttttaatagtggacagacggtgagcgatggtgatcgttgtacggtttctggagagttcctccagactgtgctggatccatcgctcactttcgttgtccagggcactggttgcttcatcgagaataagaatcgggggattcttcaagaagacacgggcaatggaaatacgttgcttctggccaccggaaagtctggcaccacgttcaccgacaaaggtatcatattgatcgggcaattccataatgaagtcgtggatattggcacgtttggcagctgcaataatttcatcttctgaggcatctggtttgccgtaagcaatgttatcgcggatggatccggagaacagatagacatcctgctgtacaacgccaatccggcttcgcagactttttagagtgagggtgcggacatcgtgaccatcaattgtgatccggccatcggttacatcgtagaagcggggcagcagggagcatatggttgtcttaccgccgccggaaggaccgaccagtgcgacggatctgccggcaggaatatcaatggatacatgggaaagaacggttgtctcatcgtcgctgtaatggaaggagacatcttcatagcagacatgacctttcacattggcaagatccacggcatccggtgcatcctgaatatccggcacggtttccataacatcaagaaaacggcggaagccggaaagacccttctgcatcatttccatcagttctaccagaatctgtattggactgatgaagatgccgatatacagggcatacatagccaggtcggcagcagacatttcgccattggcgattaagaaaccgccataaaccagtgtgacaagatacatcatgccctggaagaacagattggagctcatgaattcccccatacatctatagttgtcttttttggaaacaaggaatgcctgattgctccgtcggaacttttctttctcgatgtcttcatttgtaaaggattgaaccacacggatgccggctaaagtatcctgcaggctggcattgacatccccgatttttcttctgttttccatgaatgtccgctgcatcttctgattttgacggaaagagaagaaaaacatgacaatgacaaggaaaatcagaggcagagcaagcttcctgttgatgacaaaaaggaagatgaaggcaccgacaattttgatcagagaaatgaacagattctccggaccatggtgggcaaactcagaaatatcgaataggtcactgaccagtttgctcatcatctggccggaattattctggctgtaataggaaaaagacaatttttcataatgctcaaagagctgctgacgcatatcccgttccatgttggcacccatcatatggccctgatagctgacataatatttgcataggctctggatcacgtacatcaggaacaatccgatgccaatccatgggaggacatgcaggatcatgcttttatcctgagtgaaaagtgttttggtggctgtccgcagaatctgcgggtaggaaaggtctacaaggctgatgatggctgcacagagcaggtcaataaaaaagaccactttataggggccgtagtaatgaatgaattttttgagtgtatgcataaaaagttcctttcatcatatgatttctatttggtcagtcatgacgcagctcttattataaaggaatacgggcactatgacaagccgttcattcaagtcatttaccgaccccgtttttatggtatagtgatagaaaatccggatttgtgaagttggaggaaaaggtatgacagaatgggaaaaatcctatttttgacgaatagagaaaaggacattcagatgtattaaaacgttaatcgcatctgatgccataccacatttccgtggacagattctgaaatgccttcgtccacgaaaccaaaggaggcataataatggatcagcttgtctttgcaggttaataccagcccttttcggccatgggatttggcgtcaagaatggctcttcggattaattctcctgcatagccatgctgacgataagaggggatggtattgacaccgaaaatcatttgccatgcccctttttcattgtgcatagaggcgttttcatacatttcatcggtcaaatccggatggtcggtaacaaagccatctacaaaggcaatgagtttgtctgcatcaaacatcagccagaaatgatcgccgtaaaatttgatccgttctgcaaattcttctttggttgcggcttctgctgcaggaaaacattctgcttcgacagcagcgaccgcttcaaggtcattgatggtggcagttcttatcttcatatgatgccatagattaatcgattcgatatgtgctttttttaattcatttttaaaaattttttcattgtccatgagaaccccacctgcatttaaattttaagaatcgtatcataaattaaaatatttgtcaatcaaaacatataaaggatattcgggccagcgtggatgtattgatacatgaaaatatacagctgcttctttttgtgatatagtgttgatagaaacaactgtacttggaggtatacgatgattttttgtttttcaggaaccggcaacagccgatatattgcacagcggattgcagaggcgttgcagaaaacagtgatagatttaaatgccagaattaaagataacgatacggcaacagtggataccggcagcgatgtcatcatggtgacaccgacttatgcatggcgtattcccaaaattgtttcggaatggatggcgaaaacaaagtggacaggtgcgaagcgtatctggtttgtgatggattgtggcagtgaaatcggtaatgcagcaaagtataatcgcagcctggcagaacaaaaacagcttcactatatgggaacagcacagattattatgccggagaattatatcgccatgttcaatgcacctcaggtgaatgaggcacagcagattacggcaaaagcggaacctgatattcaggcagcaatcaaatgtattcagaagaagcaggaatttcctgtaccgaggaataatttgtatgaccgtttgatgagtggaccggtgaacccgattttttataaaatgattgtaaaggcggatgactttaaagcaagtgaagcctgtactggatgcggattgtgtgttagaaaatgtccgatgaacaatattcaacttcgggagaaaaagccggtgtggggcaaaaactgtacccattgtatggcctgtatctgctattgtccgacggaagccattgagtatggcaaaaagagcgttggcaaaccgaggtatcaatttgaaaagctgacaggggtgaagtgatggagataaaactacattatcaggaaaaaggggaaggcgaaccgatgattcttctgcatggaaacggggaggatggttcttattttgcacatcaaatggactatttcagcaggaattatcgtgtgattgtggtggatacaagagggcatggacagtcacccagaggcactgcgccatttaccattgctcagtttgcagaggatttgcatgattttatggatgagcttgacatttcaaaggcagtgattcttggcttttcagatggggcaaatattgctatgaagttcgttcttaaatatcctgaaagggtaaaggctctgatattaaacggaggcaatctgaacccgaaaggtgtaaagcctatcacgcagatcccgattgagatcggttacaggatagcctcgaaattcgcttcaaaatcagctggggcgaggaaaaatgcggaaatgctgggactgatggtgaataatccgaatattgaggcagaagaattgtccaagatcacggttccgactcttgttatttccggaacgaaggatatgattaaggaatctcacacaaaggagattgccaaagcactgccaaatgcaaagctggctattatagagggcagtcattttgttgccaatcagaattcgaaggtatttaaccgggtggtggagcagtggttgtcggtggtgcagcatgaaagatgaaaaggaagcaaaaaaagttggccttggaaaaaatatcgcaatgaaaagaaaagatattgtcaaaaggtggaattgcttatattacaaaatgaatttaaggtggggtaataatgtttatacaaccggaccatacatacagagatattcaggaaaaatccttccagcagtggctggatgaaatggagcagcatgaggatttggctgtcagcggcggcgtcaaactggccagagaatatgtacagtatctgaaagatgagataaagcgtcaggaagaatccaatcagctgaaaatagactatatgaaaaaactgaaaaacggcagataacgataggagcaacagactaaacatcaggaagcagaagagagatgtttagtctgttttttgtgtagcgagagttagagttgtaagttgacaactatatcgcactgcgatacaaagactatttgttttcggctcaatatttttagtttaattcggcgattcgcgatacccccacatagatttggctgatcttataccatgtggcataatccgtcaccccggtctgaggaagattgaagatcttctggaatgttcgtacagcctctgcggtctgattgccatagatgccgtctgccgctattttcggaatagccggataattatcggagatacggtttaattgttcctgcatctgctggaccttctggcctgaactgccgatggtgagatcgtaacccggccaggagcttggaatgccgctgatctgttctgcagagttaatatagatatcatccccatagtaatagcgcagaatctcaatgggtgaataaccctgttcgcccagatccttagagccccactgactcatccagtttgggcaggagactcggcgaccgtcacagtactgggtgagaatcggctgcaggacacccggacgggagagatagttggagaaaatcatatccactgtttcggatatgttttcaaaaatatttcttccatagacaaagaaatggtcgtaggcagtggagttggtgatagtaaaatcataacccttattgcgataccattcagtgaacactctgttgagggtgaaggagataatggccagacagttggcgataatggaggattccggccaggtggcgtagatttcactggaagcgacgtttttgatatattctttaaatggaatataataattggcagctctggtatctgtaggcggtccgtcgtggacgatgatggtttcgggaatgacaacacggcttagtacgacttcaccggattcagagacatctttgatttccgcttctgcgattttaggcgggaaattaccgtatagggtatgaggcggtacaacgatcggagaagcttcgatgttggccagcggcataagtcgggcgctctgaagggcagtaacgttggctagtatctgagcaccgctgattgtcagattggaataaccttcagcctgaacggtgaaattatactctgaatagggttgggcactgctgctctccagactgtaagaaacaggaggggcaggcaattcaatggtgggtgtttcaccggaattatctgttgtcagttcctcaataatattgtctggatttccggtatctgtaacctgaatcacggcattttcgatgggagtataatcattgcgacctgtgacggcaagctgcaggcgaccgtaggaagcggcggatacctgggccggcataacaggaactggggatgaagccatgggtgtaaacctcaatagggaattgatttattatatgcatatttgacgaaaagatgacggagaaagcatgcattatgtgaaaaattatgcatacaaaaattttcagataatcatataattatttaggttgaatttgcttttaatctatggtatacttcatgcagtttaaaattcagtgtcgaaagatattgaatataagtgatttttggaagttatttacaaaaaaggacaggagtggaagtatcaatgatgtgtttatattcgcaaagcttgaaaatgcatatttatacaaaattctccatttcttgtttatatttattaacttaaaaaaagaggtttcatgttattgtcttttctatttttgacatgaaattatcttttttttttgcaaattaggagaaaggatcaggtgagaaaatgaaagcgtttctgattttggcagacggtactgtttatgaaggagaaagcatcggttctaccagagaagttatcagtgaaattgtgtttaatacatctatgacaggttatttggaaattttaacagatccgtcctattgcggccagtctgtcgttatgacgtatccgttgattggcaattatggtgtatgttatgaggatatggaggatccggaatcttatgtagacggttatatcgtcagagagatctccaatagcccaagcaacttcagaagtgaagataaacttgaaaaattcctggtggatcatgatatcgccggcatccagggcattgatacacgtgcattgacaaaacgtctgagaaactacggtacaatgaacggcatgatcacaaccaatgaaaattttgttctggaagaggttcttccgaagattaaggcatacaaagtaacagatgcggtaaaacgtgtcagctgcaaggagaagacagtccttccgggtgacggcatgaaagtagctttgatggatttcggcgcaaagaaaaacattgccaaatccctgaatgagcgcggatgtgaagtaacgatttatccggcgtatacatctgccgaagagattattgcttccaatccggacggtattatgctgtcaaacggccccggcgacccaaaggattgcggaccgatcattgaagaactgaagaagctttatgcaacagatattccgatttttgcaatctgtcttggacatcagctgatggcgctggccaatggcgctgatacaagaaagatgaaatgggggcatagaggtgcaaatcatccggtcaaagatctgacaacaggccgtgtgtatatgtcttcacagaaccatggttatgtggtagccgataagacagtaccggaaaatgtagctgagatcagtttcattaatgccaatgatgccagcacagaaggtctgcattaccttggcaagaatatttttacggtgcagttccatcctgaagcctgcccgggtccacaggatacagcgttccttttcgataaattcatagacatgatggaggtcaataaagatgccgaagaataatagtattaaaaaagttctggttattggttctggtccgattgtcataggacaggcagcagagtttgattacgcaggtacacaggcctgccgttctctgaaagaagaaggtattgaggttgtactggtcaattccaatccggcaaccatcatgacggataaacagattgcagacaaagtgtatattgaaccgctgacaacagaggttttgaagaagattatcaagaaagaagaaccggacagcattcttccgacacttggcggacaggctgcactgaatctggctatggagctggatgagagcggattcctggttgaaaatcgtgtcagaatgatcggtacttcttcacagaccatcaagaaagccgaagaccgtctggcattcaaagagacaatggagaagatcggcgagccatgtgcagccagtgaagtctgcacaacacttcagggatgttttgattttgcagagaagaacggttatccggttgttatcagaccagcttatacactgggcggcagcggcggcggtattgcacatgatgcacagcagctgcatgatattgccagcaatggtctgagactgagccgtgtcggtcaggtccttgttgaacgctatatcggcggttggaaagaaattgaatatgaagtgatccgagacagctacggcaactgcattaccgtatgtaatatggagaatatcgatcctgtgggcgttcatacaggagacagtatcgttgtggcaccttcacagactctgggggataaagagtatcagatgcttcgtacatctgccctgaacatcattcaggaactggatatccacggcggctgcaacgtacagtatgcactgaatccaaacagttttgaatattgtgttatcgaggttaatccgcgtgtatcccgttcttcagcgttagcttccaaggcaaccggttacccgatcgccaaagttgctgccaagatcgctctgggttatgccttggatgaaatcaagaatgcggttaccggcaaaacatacgccagctttgaaccggcccttgattatgtggttgtcaaaatcccgaaatggccttttgataaatttattacagcgaaacgtacactgacgactcagatgaaagccacaggcgaggttatgagtatctgccagaatttcgaaggtgcgctgatgaaagccatccgttctctggaacagaatatttacagcctggattacggcaaataccatgagctgacagatgaagaactgaaagaacatttatatagaattgatgacagacgtcttttctgtatcgcagaggctattcgtcgtggttatacactggaagaaatccatgccatcaataagattgatctctggttcctggataagatcgccaatcttgtcaagatggaacagcgtctgaaaacagagcctatgtctgttgaactgatgaaagaagcaaagcgtatggaattccctgataaggccattgctgagtttacacatcagtccgaagcagaagtgaaagcttatcgttacagaaacgatatcgttgcagcattcaagatggttgatacatgtgcagctgagtttgaatccgaaacaccatattattattcatgcttcggcaatgaaaatgaagttgaagttggcgagaagatgcgtaagaaagtccttgtactgggttcaggcccaatccgtatcggtcagggtatagagtttgactactgctccgttcacagtgtatgggcattcgcagactgcggttatgagacaattattgtcaacaacaacccggaaacagtcagcacggactttgatattgcagataaactgtatttcgaaccattaacacctgaagatgtggagaatatcgttcgtttggagcatccggacggtgcggttgttcagttcggcggccagacagccattaaactgacacaggccatcatgaagatgggtgtgccgatttacggtacacaggcagaggatgtagatgcagctgaagacagagagctgtttgatgaaatccttgagaagtgtaagatcccgagacctgcaggcacaacagtattcacaacagaagaagcattgaaggcagccaaccatctgggttacccggtactgatccgtccttcttatgttcttggcggacagggtatgcagattgcagttaatgatggcgatattgtcgaatttatgaatattatcaatcagacagttcaggaacatccgatcctgatcgataagtatctgatgggtaaggaagtcgaagtggatggtgtctgcgacggcaaagatgtcctgatccctggcattatggaacatattgagagagccggtatccacagcggtgacagtatttccatctatcctgcacagcatttgagcgatgccgttattgataagattgaagattacacagcgaaactggcgaaaggcctgcatgtcaaaggtcttctgaacattcagtttattgtatatcaagaagaggtttatgttattgaagtaaaccctcgttcaagccgtacggtaccttatatcagcaaggtaacaggtattccgattgtcgatattgcatcaaaatgtatcgtgggcaagacgatcagagagcttggttatgagccgggtcttcagaagaaagcagattatattgccatcaaacagccggtattctcattcgagaaactgcgtggtgccgagacaagccttggacctgaaatgaagtcaacgggcgaagtccttggtattgccaagacatttgaggaagccctgtacaaatcatttatcggtgccggcatcaatctgccgcggacaaagaagatgatctgtacagtcaatgatgcggacaaagatgaattagtaccgatcgcagcacgcttccagaaattgggttataccatctatgcaacccgcagcactgcagataagctcattgagaacggcattcctgccatcaagatcaagaagatttctgcaggctcaccaaatgcgctggatctgatccttgccggtgaagtcgaccttgttatcgatacaccgacacagggccgtgacaagagcagagatggtttcctgatccgtcgaaatgccattgagacaggatgcacatgtctgacatccttggatacagcggcagcattggtaacaagccttgaaaatgccaatatggagacactttccgtgatcgatatcgctgaaatctaaaagcttctgacattttgacggtatgaaaagattcatgctggtcaattgagaaaaagtatgctaaactaaatacaaaatatggaaaagactgcaagggggcagtgtgtggagtgagaattccatgcccttttgcggtctttttgtatatgcctgacgtaaattttttacaatattgacaaagaaagggcattattgatatagttgaactatcttaatataaggagagagcgtaatggcaaaatatacaaaaaaggacattattcagatggtggaagatgatgatgttgaatttatccgactccagtttacggatattttcggagcattgaagaatgtggcgatcacagccagtcagattgaaaaagtactggacaatggctgtatgtttgacggctcttcgatcgaaggctttgccagaatcgaagaatccgatatgtatctggtacctgacctgaatacatttgagatctttccgtggcgtccgcagcagggcaaggtggcacgtctgatttgcgatgtttacaaaccgaacggtgaaccttttgagggcgatccccgttatattttaaagaaagtgatcaaagaggcagatgcgatgggctatacattcaatgtcggtcctgaactggaattcttccttttccatacagatgattatggtatgccgacgacagaaacccatgaaaaaggcggttattttgatcttggtcctattgaccttggtgaaaatgcaagacgtgatatggtactgacccttgaggatatgggatttgaaatcgaggcatcccatcatgaagttgcaccggcacagcatgagattgactttaagtatacagatgctcttcatacagcggacaatattgaaaccttcaagctggttgtcaaatccattgcgaaacgccatggtcttcatgcgtcctttatgccgaagcctgtttacggtgtgcctggttccggcatgcatatcaacatgtcactggatgaccaggatggcaacaatatttttggtgatccgaatgatgagaatggtctcagcaaagaagcctattatttcctggccggtctgttaaagcatgcaaaaggtctgatggcattgacgaatccgttggtcaattcctataagcgacttgtaccggggtatgaggcaccggtgcatattgcctggtcttccatcaacagaagcccgctgatccgtattccggcaacccgaggaaccggacgtcgtattgaactcagaagtcctgatccggccggcaacccatatcttgtattggcagcatgcctggcagcgggtttagaaggcttaaaagaaaagaaaatgccgatgccgaatgtggataagaatatttttgagatgacagcagcagaaaaagcagcagagagcattgaagaactgccgctgaatctttttgatgcagttaaagagctggaggctgatcagtatatctgtgatactctgggcaaacatgccagcagtaaatacatcgaggcaaaatacgcggaatgggatgaataccgcagacagatcacaaactgggagattgatcagtatctgtacaaaatttaattttttccccttcttgatgaatcattaatggaggtggaaaagagtggttaatattatcgttgtcttttcaagccagaaggatggcattaatatccgcaaccttctgatgaggcacgggcataatgtggtcactgtctgtaccaacggagccgctgtcagtcaggccgttgatcagatggaaggctccgacggcattgttgtgtcgggctataagtaccaggatatgacttacagtgaccttctggcggatcttccggatacatggcagatgatcgttatggcctctcagggtaatctgagtcatatttttgagtacaacgttatcaaaattcccatgccggtcaaagtctatgatctatttacaacattgcaggccatcgagataaccatcatacgccgacgcaagaagcgcagagagaagccgaaggagcgttcatccgctgagagagccttgcttgagcatgccaaaagccttttgatggagacaaagaatatgtccgaggtcgaagctcacaggtacatacagaaatgtagcatggataacggaactaacatggtagagacagcgcagatggtcattgagatttattctcaggcgtaaagcggtgtgcgaaacttcaagggtattgaattgttgagatatttaacagtttcgtggcggcaaaacacgaaggctgtgaattgattggatcactgtattattcaaatgcaggcacgtttgcactgccagcacctagcagcggtacataaggcagcaaaggacgctgcctaaggaccggctggtgctgaagcacctgcatctgaataatacagtgatccaatcgataatgaggtttattgagttttgccttaataattcaaggttatacaactgttaaatacctcaacattttcaaaggctgtgagtttcgcaaatattatttacgccgtaggggttataggggagtgcagctcggaaggttatagaaatggatagataaactcgagtataggacttttgagtttggaaatttgttagaatgcgtgcaattcaaatggtatagatagatgagataagtgcatgtagaaaatgtacacgagcctactgttaacttaaatataaaaatggttgacaataggctttctatggtttacaataccaacatcagaaatttttatttgaatgaaagaaacaagcttgcaaatgcttgtttctacattaagaagagatgtagaggagttgttaccatggaaaatgaattttcaaacagaatttcagtgaagaatattgtgttagccggcatgtttgccgcattcctggcggttatgtcccaggtttccctgccgatgccgacaggtgtcccgattacggtgcaggtttttgcggttgcactggtgggtgtgatcctgggctggaagagaggtgttctggcggttcttgtgtatattttaatcggtgccgttggcgttccggtttttgctaattttaaaggcgggctttctgttctgacaggcctgacaggcggttacatcattgcgtggccggtgatgacaattttatgcggtatccagccgaagacgcagaatgcaaagctgaatatgacagtgaatattattttatctctggtgggtctggctgtctgtgaaggtgtgggcgccctgcagtgggcattgctttcaggtaatgatcttagaggcattattatttattccctgacagcatttgtaccaaaagatatcgttttgacggtgctggccgtgatcatcggcagacaggtgagaaaaatggcagcaaaggccggtgaattgtagaaataaaaacacgcaaaataagaaatcgtgaacactttggtgggcacgatttctttgtgggaaagaacgttttattttgtttactatattctgtctcgacagctattgacaaaaattattaataaggatagactaactccgtaagaattgattttttttatcaataggagacataaaatgacattaagagatttacagatgggtgaatctgccgttatcacgacagtaggcggaagaggtgcccttaggcagcattttctggatatgggcatgattccgggggttcaggtaacacttgtgaagtatgcgccgatgggagatccgatggagctgaggcttcacggatacgaactgacactgagactggcagatgcagagcagatagagattgaagaagttcagaaggcaggagccgaacatgaggcctctaaggcgggaaaaggtggaagattgaaggaaagcgggcgctttacggatcatcccggtcttggtgagggtggcaaataccatgagaaggagacggagcatccgcttccggatgggacaacactgacttttgcattggcgggcaatcagaattgcggtaagacaacattatttaatcaactcaccggttccaaccagcatgtaggtaatttcccgggagttactgtggaccgtaagagcggtgtgatcagaggacatgagaatacactggtgacagatttgccgggaatttattccctgtcaccctatacaagtgaggaaattgtctcaaggcagtttattcttgatgaaaagccgacaggtattattaatattgtggatgcaaccaacattgaaagaaatctttatctgaccatgcagctgatggaattggatgtaccgatggtgctggcattgaatatgatggacgagatgcgcggcaatggcggaaccgttgatatcaatgagatggagacatttcttggaattccggttgtaccgatttcggcagcgaagaatgaaggtattgaggaacttgcaagtcatgcgctgcatgtggcgaagtatcaggaatgccgcggaaggaaagatttctgtgatgagagtgatcatggcggtgcggttcaccgctgtctgcatggcattatgcatctgattgaagatcatgccatacaggccggcatccctgtgcgctttgcggccacaaagctggtggagggcgataacggcatcctggaagctttgaaactgtcgcagaatgagcaggagatgcttgagcatattatctgtcagatggaggaggagcgcggacttgatcgtgcagcggccattgcggatatgcgtttttcatttatccagcacctgacagaagcatgcgtggtcaaaccgcatgagagcaaggaacgcgagagaagtcgtaagattgatcagatccttaccggcaaatatacagctattccatcttttatcggtattatggcgctggttttctggctgacattcaacgtgatcggggcatggctgcagggactgcttgaacagttcattggatggctgacggaactggcagatgcgggaatgacagcatggaatgtgaatgatgccctgcattcgttgattattagcggcatttttaatggcgtcggcagtgtgttaagcttcctgccgatcatcgtgacgttgttcttcttcctgtcacttctggaggatacaggttacatggccagagtggcttttgttatggataagctgttgagaaaaatcggtctttcgggacgaagtatcgtaccgatgctggtcggctttgggtgttcagtaccgggggttatggccagtagaaccctgccatcggaacgtgaccgtaagatgacgatcatgctgattccgtttatgagctgtaccgccaaactgccgatttacggattttttacggcggcatttttcccggagtacagcggattgattatggttgcactttattttggcggtattgcagtcggtattctggtggcaatgattgcgaagaacagtattttcaaaggggatgcggtaccttttgttatggagctgccgaattacagaatgccgggagccaagaatgttttgcagcttttgtgggataaggcaaaagatttccttcagagagcatttacggttatatttctggcaacgattattgtctggttcctgacaacattcagtctgcatctgaatatggtgacagaatccaaagacagtatcctggccggtattgccggtgtgatcgcacctgtttttgcgccgcttggattcggtgactggagaatatcaacagcattgatcaccggttttattgccaaagagagcgttgtttccacattatctattttgtttgggacaacaactgcactgacgtcgctgatatcgacaaaagcagcggcagcattgcttgtattctgtttgctttatacgccgtgtatagctgccattgcatccatacgaagggagctgggacagaaatgggccattggtgtggttattctgcagtgcgccattgcatgggtatgcgcatttgccatgtatcatttgctgatgtttttgtaacagatgacatattttactttacaggctgcttttcggaaagttcccggaaggcagctttttacgttgctgactcagatgcgtactttgttgaattcctttcgttcagtgattgaccgggagaatgagttgtaataaaatagtaagagtcaaaatggccgaaaggagatttttggaatgcgaacagctgaagagcttcgaaatgaactgcgggggatggacaggcggagctatccggcctataaggcactggcaggaacctggcagtttgagaaatatagattaaccattgatcatgtgcagggagatccgtttgcctcaccttccagtctgcatgtggagctgtctcacagacaggccaggattccggagcgatattatgagaatccgtatgcaaaaacagcactcagagattatattgtccgtgaagcagggagacagtttgaaaaatgcaatttcaaggccaggggatccggcaagagcggtctgatgagcatcagccggtgcggccaggaggtactggagcgaagcgcctgcgaaattgacggggaagggattattctcagatttcatgtgggttttccggcttttggaaggacgattcaggccaaggagctggagaagatattatttgattttctgccggagtgcatcgagaatgccatgtgctggcgaaggcttgatcatcgagcagtggaacaggctgtctggctggcagaggatcaggaagcgctgcggaagatacttgtggaaaggcaatgggtcgcttttgcggcaaatggttctgttttgccgagaaagagcggtgtgtcagaactgccgatgacaggaagcgttccgtttacggcaccggattcaatgacagagacggttgaactgccgcatcgcggcaaggtaacaggaatggctgtacctgagggcattacgctgatcgtcggcggcggttatcatggcaagtctacatttttggaggctctgcaaaacggtgtgtataatcatatcggcggtgatggcagggaattggttatcacagacaatacggcagtgaagctcagagcggaagatgggcgttctgtgaggaatgtagatatttccatgttcatcaatgatcttccgaatggcagggatacgacctgcttttcaacgatggatgccagcggtagcacttctcaggctgcgggagttgttgagagcatggaggcggggacacggctgttattgatcgatgaagatacatcggcaacgaattttatggtgcgggatgcgctgatgcagcgggtgatttcccgggagaaagagccgattacgccatttatcgagcggatgcgcgcactttatgagcaggcgggtatatcgacaattcttgttgccggaagctcaggtgcatttttttatgaagcagacagagttattcagatggatcgctatcatgtggtggatatcacggaaaaagtccgcaacatctgtggacaaaatgcctgtggacagcatgttatggagcaggtgcagactgcagcctttgagatgccggtatttgacagaaaaagtccggcagccggtcataaacgggaagtgacggacacgggcagagaacgcggcggccggagaggacggcatggatcaggtgccgctgatcgtccgcgtacaatgaaggtgaagatcatgggcaaagagatgctgatgcttgataaggaaaacgttgatctgagatatacagagcagctggcagacagtgagcagacaacggcattggcttattttatgcgttatcttctggaaaaggcaaagtcagcacagacagtccgggaatctgtcagtgaaatagaaacactatttgagaaaaaaggatggcaggctttttgcagtggctatgtaccctgcgggctggcacggccgaggacgcaggaaatatatgcggtacttaacagataccgcggttaatggatggtacacgcctgacaggaaggactttgataaggaatgttgtaaatgcgtgcattgaatttaggaggaaaatatgttgaatcagttttctagaacagaattactgctgggacatgacaatatggaaaaactgaaaaatgtcagagtggcagtttttggaataggcggtgtcggcggatttacagttgaagccctggcaagaagcggcgtcggcacactggatctgattgatgatgacagggtgtgcctgacgaatatcaatcgtcagattattgcaacaagaaaaacaatcggacagtacaaagtggatgcagccaaagaaagaattctggatattaatccggatgcagtagtcaatacctataagacattttttatgccggatacggcagatgcttttgatttttctgtctatgattatgttgtggatgccatcgataccgtcacgggcaagattatgcttgtggaggctgcgcagaaggccggtacaccgatcatcagttcaatgggagctggcaataaactggatccgacagcttttgaagtggcggatatttataagacatcggtatgccctttggcaaaggttatgcgccgggagctgaagaaaaggggcatccgcaagctgaaagttgtttattcgaaagaaaaggcattaacaccgattgatgatacggccaacagctgcaggtcacattgtatctgtccgccgggaagtgcaagaacctgtacacagagacgtcagattccgggaagtacagcctttgtcccgtctgtggtgggcctgatcattgccggagaggttattaaggatttgacggtacattaagacggctgtatcgcatattactttttttctctaaattatggcatataaggtataaatgtggtatactcaatataccttttgggttatcccggcgggaagaaacgcccggattgaataatagaggaaaggataagtttatgctgaatgaagagaaaatccgctggatgaccagagcttctatttatgagaagcgtcagggacatacggatcttgaacgaaatgaatattttcttggtgattatgtcagactccatctgatgaagaacatgattggtgtgacggttgcctatattctgatggtaggactctatgcggtttgcaagattgaggatatattcgcattagcagcgaatatgcagttgatggtgttcctgaaggaagtactgcttgtttacctgattcttgcgcttatttatacgggtattggtattatttattatgcatggcagtatcagtcaagccataaacagttaaagaagtattatcgcatactgcgccatattgaccagtgcggtgagaagaacagccgatcacaggaggataagagatgacggagatttttgtgatgagggacagaatcaatcgctttgtgaaagaatacgagacatggttcctgatcattgccaagtttataggaatgatgtttgttttcagttgtgtcaattcacagcttggatattttgaagttttgaacaatccgatggtcaatatattgctggcattgatctgctcgattattccgggcagtttttcggtatttatcgtggcagcagttattgcagcacatatggtgaagctgtccgttttgcttgctgttctgacagttgtggttatgctcatcgtgtatctgatgtttttgaagtttgcaccgggacagagtgttgtgttgctggcggtgccggtactgatgcagtacaatcttcattatatgatcccgatcctggcaggtatgtatttttcaccttatgcggttgttccggcagtgatcggtctgtttatggtgaagtttctgggatatgcatgtgcggctgtatccatgacaggtacaggcatgtccatcaaccttgaaggtgcgacagaagccatcagcacgattttcggtcagttagccgatgacaagtctatctgggcttatgccattgcggcagcagtgacgatgacggttgtttatctgatcagtcagttatcctttgattatgcctggtatgcagcgattgtggccggtgcagcagcagagatcattgttacgtttttctgtgcagcggcatttggaacagagctgaatataatcatgacgaacgtgggtatcatcattggtactttactggcagtatttttgcagtttatgaaatgtgctgtagattattccagaaaagaatatatacaatttgaagatgacgattattattattatgtaaaggctgttccgaagattttcatatcggaaccggagaagaatgttgtgaagatgaattccaggaagaaggcgtttgcatccaaagaggtgcaggcatcgaaggatcatgaggaatagttaacgggaatcagtgaaagacaggggggatatgaaatgaataactggatgaaatcattgacgaatattggattgccgcagtcgtttcatattacctatattgttgaaattcttatcctcacagttattatttatgaactgttgatatgggtcaagaacaccagagcctggacacttctgaagggcattgttgtcgtgacggtttttgccctgggttcctatttctttcatctgacaacactgacatggatcatgtcgaagaccgcaggtgtgcttgtgacggttgttgtgattgtttttcagcctgagcttagacgtgcattggaacagctaggaagaaagaatattatcttctctattttcggtccggcaacggtgcgtgcagaggaggacaggagaagtctggacaagatcaattccgaaattgtacgtgccgtatatgagatgggcaaggtcaaaaccggtgcgctgatcgttatggagaagcaggtgattctcaatgaatacgagcgtacgggtattcccattgatgcacagatatccagtcagctgctgatgaatatttttgaacataatacaccgctccatgatggtgcggtatttataaggaaccagcgaattgtagcggcgacctgttatctgccgctgagtgacaatatggaacttagtaaggagttgggaacaagacatcgtgccggcgttggcatcagtgaagtctccgatagtctgacgattattgtttcggaagaaaccggtgctgtttcaattgcggaaggcggattgctgaagcgggatgttggacaggatgaattgaagaagaaactttcagagattacacagggaatagaagaaggcaaacgtaaaaagctgatgggaaggattaagaatgagagaaagactgacgcataattttggtttgaaacttctgtcattggctcttgcaattctggtatggattgtcgttttaagcattgaagatccggtgtatacccgtgaattttcagatatcagcgtgacggaagtgaatggagatcagattactgaagcaggtaaggcctacagctatgtaggcggcaatacagtcagtgtcaaggtcaagggaaagacctcggtggtcaatcgattgtcgaaggatgatcttctggcagtggcagatctttccacactgtcgattacaggtgcggtcatggtggatgtctcatgcccgaaatatccgagtcttgagatcacaccaattggaagcagcacagtactcaaggttgaaatagaagatctggttgagaagtcgttaaatgtcaaagtgaatacgaatggcaaggtttctgagggctattatatcggtcagggtgtggcaacaccgaatatggttacagtatccggtcctgagtcggtggtcaataagattaacgaggccagtgtcaatgtcagcataggcagtggtaatacaacggatgtgacgacgaatacgacgctgaagctgctggatcagagcgagggtgaggtatcgagttctacattgaatatttcacagactgatatcagcgtcactgtgccaatctatgagacaaagacggtgccggtggactttggtgtaacgggacaggtggcgcatggatacaagatggtttcggcagcctatgaaccgaaagaggtgactgttgccggaagaaaggaaaatctggacaagatcagtcaggtaacactgaaggattatgatatttcaggcaagaacagcaaggtggaagattccatatcgattgtacagaatcttgccgagcagcttccggatggtgttgtatttacggataaggaagcaacagttgcattggttgtggatattcagcagattacagagacatcctttgaactgccgctgagcaagatatcgctgaagggcagtaatacagcctatacttatcaaaagagcgggccagggtcttctgataaggcagtaacattgaaagttaaaggaatatccagtgagattaacagtctgacaacagataatctgacagcgctgattgatgtgagcaattatggtgagggagaatatgacctgccgctgacggttatctttgatgataatttggaactggccgcagatgcatatgtacatgtggtgatttctaagaccagtgatgaatagaaaataggatattgagggaggcactgaagatggtaagtgtagaactgcagcttcaaaacccgtcgggacttcatctgagacctgcaggtattctgtgtaaagccgcaacaaaatttcaatcgcatattacaataacgacagcagacggaacagaggccaatgccaaaagcgtactgagtgttctgtcagcttgcgtcaaatcaggggatatgataacgctgtcctgtgacggtaacgatgaaaacgcagccctgaaagaactggaactggttatcagagaacgactcgaagaactataaatccgtaagcggaaagcccatacgcatcggtgcggaaataaaaatgatcgggtcatctatcatttgaataaaaatacatattgtattgagcaaatagtactcggataggagaggccgaataaaatgttcagtcacaggtgcttcagcacttatcgaaacggagcggagatttagtagcggaagcggccagtgatgaacattttgtttcggcctttccttgtgaatatccgggcggcacaccgcatttttatacacagaatattgacagatgcacttttttttgctaaagtaatgtttagacgaagttcgtctggaaatagattgaaaaggaatgaaagacatggggttagtattttaagtccgacattgtttaagttaattgtatatggagtggtccttcgactccgtcgctcatagatcgtaagataactaacggagatgtagcagaaaggtccgcagatagttaaagctgatggaattccttggctttattttcatgcgcaaatacagtgattaacggaggaatataaaatgttaaattataagagatataagagagtacctgtagttcattatccggagagacagtggccggacaaagagatccagaaggcaccgatctggtgcagtgtcgatctgcgagacggcaatcaggcactgatcgagccaatggttgttgaagagaagattgaatttttcaatttgcttgtgaaactgggattcaaggaaatcgaagtcggtttcccggcagcttctcagattgaatatgattttctgagaacactggttgagagaaatctgattcctgatgatgtcaaggttcaggtcctgatccagtgcagagagcatctgatcaagagaacatttgaggctattcagggatgcaagaatgtcattatccatatttacaattccacatccaccttgcagagagatgtggtctttaatatgggtcgtgaagagatcaagcagattgcagttgatggtacgaagatggtgaagaagtatatggaaggctttgacggcaatatccagcttcagtattcaccggagagctttacaggtacagagcttgattttgcgctggatatctgtgaggcagtcaaggaagtatggcagccgactgtggagaatccgatcatcttcaatctgcctgcaacagttgagatgacaacaccgaatgtctatgcagaccagattgaatggatgtccagacattttacagagcgtgacaagattgtgctgagtattcatccacataacgacagaggctgcggtgtggctgcttctgaactggcattgctggctggtgcagacagaattgaaggtacattatttggaaacggtgaacgtacaggtaatgtcgatattctgaacattgcttacaatatgttttcacagggtattaatccggaactggatattgagaatgtcaatgagattatagatgtatatgagagatgtaccaagatggatattgatccgcgtcatccatatgcaggcaagctggtcttcacagcattctcaggttctcatcaggatgccatcaacaagggacttcatgcgatggaacagagaaattccgagtattgggaagttccatatctgccgatcgacccggcagatcttggaagagagtacgaaccgatcgttcgtattaacagtcagtccggaaagggcggcgtagcctttgttatggatcattactatggtttcaaactcccgaaggtgatgcacaaagagctggctgatgagattcagttactttctgagcgtcagggtgaagtatcaccgtcacagatcatggacaagttcagagagatgtatatcaatgcaaaatatccgttgcatttcaagaagatgcgcgcagaagatatttccgagacaacagaaggctacgatacaaaggttgttctgacttatacattcaaggatgagttaaagactatcgaaggcttcggcaacgggccaattgatgcagttaagcatgcactgtgcaaccagggtggtttcaataccaaactgacaatgtacgaggagcatgcattgacaaccggttccgattctcaggctgcatcctatattgaactgatgaattcagaaacaggcgagaaagctttcggtgttggtatcagttccaacatcacacgttcctctgtaagagcgattttcagcgcgatgaacagactgttcttcagaaagaaataaagcattgcagtcatgaaggctgccgtcatataacaggtgacggcagcctttttatacggttattttgtaacaaaaaattaaatttttgttacaaaataactttaaaaatgttaaagggtgtgatagaatagtaccagttggtgtgatacaaattgaaataaaacgatatgtatcgatgaaaatacataacagagaaggacggaaaggcaagtgagtataaaacgtatgaagaagaagctattagcaatgttgatgattatgttgatgtgtatcccattatcaggaactgtcactgcgaatgcagccagttctgattatcggtcctgggcacagtgggattcggaatggggaagcattcatttaggcaagagccagtataccatgaagtcatcaggatgtctggttacagctattgcaatgttgatttgtcatacaggcagtgccgatgcatcctcctttaatccgggaacattggttacctacttgaataacaacggcggttttacatcagatggttctttgtattggggtaaggtatgcggcgcagcagacaactttacgctgtataacagccgagtgagcctggcgaatatgacaaaggcacagaagatcgccaagatggcggagtatgtcaataacggctacggtgttattgtttctgtcagaaacggcggacactgggtagctgttgacagaattgaaggcagcacagtctatatgctggatccgggtgaccgtaatacagatctttttgcaacatacagtgaatccggtgtggatcgtctggctatctataaaggcaagaatgcaggcggtacagtttcaggggatccgggcaatacagacaatacaacgacgcctgacaaagtgatcggaacaggcactgtgaattgttccagcttatatgtccgaagcggagctggcacgaataacagcattattacagccatcagcaagaataccagtgtagatatccttggcgaagctaatgacagcaagggaacgaaatggtatcaagtgaaggtaggcggcagaacaggttatgtctgtgccgattacattacagtcaagaattccggttctaataacaataataataatacagaaactgcatcaggcagcggcgttgtgaactgttcagcactgaatgttcgaagcagcgcgggtacaggaagccgtgtggtgacaaccatatccagaaaccaggcggttacaattaccggaacagctaaagacagcagcggcagtaagtggtatgcggtgtcattcacgaagagcggtaagagctataagggttatgtttttgcacagtatattacattaaagagtgataacagcagcaatggcaataataacaataatagtaattctgataacagcacaccggcaacatctatcccggcagttgttaactgcggtgcattgaatatgcgttcaggtgccggcacgaattattcagtcgtgacaacactgacaaagaatacagcagtaacgattaccggagaagcaaaggacagcagcggtacattgtggtataagattactgcaggcagtaagactggctatgtgcattcttcttatctgacgaagaagaacgcaggtggcaacagcagcaataacaacaactcagatacttcgacagatgtatccggacagacaatgaaggttgcgtatgatgtggtcaatgttcgaagtggagccggtacatctaagggcgttgtgacggttgtctaccagaatgagaaggtaactgtcgtaggtcaggataaggatagcagcggcaatatctggtataagattaagacagcatccggcaagaccggttatatccgctctgatcttctaaaggctgacagctcaaacagcagcgatacaaagagtgacagcaataattcaaattcaggaacagaatcagatctgaatggacagaagatgcaggtaaaatatgacggtgtcaatatgcgaagcggagcaggtacatccaagggtgttattgaagtcatttatcttgaggatacattgacggttgtaggtcaggataaggacagtagcggaaatgtctggtataaggtcaaggcaaagtccggcaataccggttatatccgttctgatatgctgaagcagtcctcctcatcaggcagcacagcatcatccgatcagacatcggacagtacaccgacaagcggtcgtgttgttgatggatggctgaatgttcgaagcggagcaggtacatccaacaaaatactggttgttatttccgaaggaaccaaagtgacgatcagtgaatctgttaaggacggcagcggaagtctctggtatcatattacagtgaactatggcggtgtgaattatgacggctatgtttcatctcagtatatcagcaagtaatcggctgatctaacaacgaaatacataatttggcaaaacctgtggtaaatcgtgtttttaccacaggttttgattgttatttttgaaaaatcagattataatgaaatatattgtagtctaaggagaaaagattgtggaaaatagagaacaatataaacgcttaattatgttttttgcttctgcactgattctgcttgttcaagtggtgatattctactatatttggcatcgctactataactacagatcagttatcggagcattatactggcgccgaggcaactgggcattgatgggagtgtatgcttttatcaatttcttcttttcaaaaatttttggtgcctataaggttggttatctgaaagtctcagatgttattgcgtcccagatccttgccgttttatgctgcaatggcgtgacttatatgcagctggcgctgattggccgttggcgtttttcggcttatctggaacctatcatgcagatgaccctttatgatgttgtcgctgttattgcatgggtgatcttcatgcgatggatttatgcgaagatttatccgccgagacagatgctgcttgtttatggtgatatcaatccaaaggcactgatccagaagatgacatccagaacggacaagtacagtattgttgatatgatcaatatttcagagggttatgatgcagtcatagaacggatcagccattatgaagcaattgtgatcggtgatattccgtctgtttatcgcaataaatttttgaaatattgttatgccaactctattcgctgttacagtattccgaagatttcggatattatgatcaagagttcaacaaccatcaatctcttcgatacagaattgatgctgttcaggaatcgcggcctgacagcagagcagagactgctcaagagagcatcagatattgttttttcatgtatcatattggttgttttttcaccgatattggttctggtggccgtattgatcaagctttatgatggcgggccggttttttacaaacaggaaaggttgacatataatcataaggtttttatgatctacaaattcagaagcatgcgtgtggattctgagaaaaccggtgcacagctggcgaagaagaatgacgaccgtattacccctgttgggcatgtgatccggtctctgcatatcgatgagctgccacagctcttcaatattctaaaaggcgatatggcatttgtcggtccgcgtccggagcgccctgagattgcagaactgtataagaagagtattccggagtttgatttccgtctgaagatgaaagcaggactgacgggttatgcacaggttttcggcaaatacagtacaacaccttatgataagctgaaactggatctgacttacatcgagaactatactttcgcactggatttgatgatcattattcagacagtgaagattcttttccagaaagagaactcagaggggcttgataccggtcagaagacagcattgcgtacggaggacaagaagaattgaagcatgtagaggtatctgttattattcctgtgcataatggtgcggattatattgcacaggcgattgattcagctttaatacaggatgtaccgttggagattatcattgtcgatgatggttcaacagattgtctggcagaggctttgtcgccatacatggagcggtcggagataacggtgctgcataacaggcacaatataggcgttgcagagagccgcaaccggggtgtaaggcaggccagaggtgaatatatcgcttttttggattgcgatgattggtgggagcctggaaagctgaaaatgcagctgacattactcagaaagactggttatgttttgtgtgcatcaggaagacggctggtcacaccggatggaagaccgacggagagaatcatcggtgtgaaagaaaagcttacatatagggatctgctgttccagaatcctgtcaattgttcctctgttgtgatcaagcgtgatgcagccactgcatttccgatggtacatgatgaatgccatgaagattatattatgtggcttcagattttgagacattatcatacggcttgtgccgtgaatcagcctttattgaactaccggctgagcaagacaggcaaatcaggcaataagcttcattcagcgaagatgacgtttaaggtatatcggcacatgggtttcagtatgccaaaagcattgttttgcttcgcgggatatatgttcaacggtatcaaaaaatattactttcactaaaaaattaatttttttcggtttttctgtcacaattcgttgaaaaagaaggtttatatattataagagtttgaggagagcttgtgggaggcggtagtatggcaatgaatttgacggattcgggatcgaatatgcattcagaggagcagcaaaaccctgaacaggtggcaaaattcaacataaccttcaggctgtatgcatcaacgatgaagcggaaggcctatgctattttgagagatgaaggatgggcagaagatgctgttcagtggacatttatgaagctgctgcaacatttgaaccagattggtgatccgtacagtattaaagcgagatgttatattaatacaattctcgtcaataactgcttcactctgctcaagaagaataaccgatattatttcatggaagattatacctatcagaatgattacagacacagcatgatcagggcggatgagtcattagacaatctcatttaccgggaattgctggcggatgtacagcagattccggagatgtattcgaatttgatcatactgaacgggctttatgggtattcaccgcagcagatcagtgaattgctggacctgaagccggcaacggtcagaaagcgaatgcagcgaggcagggaaatgctccagagaaagatagaggaaaagcaaaagaagaataagaaatgaagaataagaaatgaagaaaaggcgtttccgcgaaggaagcgccttttgggtttaataaccggtttcgttataaagttcatagctgatatcagaaacagtagaagaagggttataatcctcattgtcaaagaggtattcgtgtagctctttgacgttttgttcaagactgtctgcaaagacataactcaatccgtctgaagggagagagcctgtttctttctcaaatggccaaccggtctgatcggcaatgttgtagttgaagatatccttggcgagggaaatcaggtcggtgctcgtcatgttggtatatacttcagggagaatcgtatcgataatattcagcaatgttccgatattcgctgatttggtttcttcaaaaaccttggataaaacgattcgctggcgttcagcacgcttgaagtcgctgtcaatctttcggattcgggcataggcggtggcctgtgtaccgttgacgtgctggtagcccggaccggatatgtattcggaatcagaaccggtgacgctgttctgttcatcaatcagaggattgatcagactgtattcggcatctgagatatccagatcgataccgcccacagcatcgatgatcttggccaggacaccgaaatcaacagttgcaaattctgtgatatccaggtcaaggttggtattcagcatactcatggacagctcagcaccgccgtaggcataggcatgagtggcttttgaaaaaccatatccgggtattttcaggcatgtatcacgataaatgctggtaatcttgacatccttcgtctcctggttgatgctgataaccataatactgtcagaacgtgcgcctgtctgaagagagccgtcacgggagtcgacaccgaaaagtgcaatattgcggtagcccttcaatgctttttgtgttgtggcatccacatcattgttgataacgatgttcgctttgtctacatcacttgcagaggctgtctggataagagaaagcttggcatagacaaatacaacagggatcaggataagaataagaaccaattcaatgccgaagataattccccagcgctttgtcttggatgatctcttcttctttcttcttttactcattgtagaaatcctcactttgtagtacgagatgcctgcgtggacagaaatctctattggttatatgaaaatgaaatgcatattaaaaagcataaacaacttttataataccttaaaaacgttgagatgacaagctttttctcaaatatcggcaaatgttgtcattgatcggataacataaagttttcatttttggttcacaatcttaacacaattaggtggtagtataatggcataaaagaaataaagacgaaaggggttgtctattatggcatttgatgaacaagatagattcgatcatacagaaactgataatcatgttaatgagcagaaccagaccgcaggcaccgctcagaacgaaggaacggaaggatccggattgtacagaatgacaagagaggatttgaagaattctacattatatacagatacagacagaagaagtgaatatacatccggtactgcatatgagaacagaacgaatacagcgcgcacaggcagttcttatgcggccggcaatgattacagctattatcatccgacacagaatagcggcggcaatggcggaaacggcggaaacggcggcagcggcggcagcggcaatttccattcaggtcctgagaaacatcattcccggaagaagggtggttttggcaagacggtggttaaggcagcatgtctcggcgttgtcttcggactggcagcttcagctgtgatgtttggtgtgaataaagcaacaggtgtatctgcatcagccagcggcagcggttcaccttcttacaatgttcagattgtgaagacatcggcagaaggtgtgacaacaacggattccaatgatgtgtctgatattgtagccaatgttatgccgggaatagtagctgtgaatacaaccgttgaatcaacttccaccgactggtttggcagacagtacacacaggaatccaaaggcgccggttcaggtatgatcatcagcgaagagaacaatacattatatgttatgaccaattaccacgttgttgaaggtgccaaagaggtatccgttcagttttcagatgaaaccacagctacagcaacggttaagggatacgatgaggataaggatgtggcagtcctgacgattgatatgtcccagttatccgacgatacaaagaaggctatcgcagttatggttatgggcgattcagatcagttgaaagccggtgaaagtgcgattgccattggtaatgctttaggatacggccagtcagtgacaacaggcgttatcagtgctgtcaacagagaagtggcattgacagataagacaatgacattgctccagacaagtgcagccatcaatcccggcaacagcggcggcgctttgctgaatggcaagggcgaagtgatcggtatgaataccgtgaagtattcagatacatctgtagaaggtatgggatatgcaattcctattaatacagcactggaaacagccaaaggcatcatcgatggtacaattgttgcaaaaacagatgagacaacggcattccttggtattacgggcggtacacttgatgaagatacggcatctgcctataatgcaccagccggtatctatgtcagcaacgtggcatccggttccgctgcacagcgtgcaggtctgcaggcaggatgcattattaccggattcaatggtgaagatgtttccacaatggaagaccttcagaaactgatccagaattgtgcaccgggcgacagtgtcaccattacagcacagttcccggacagcaacggcaattatacagaacagacattgacaaccatcatgggatcaaaggctgatgccggagacagcagccagagtacacagcagaatggtcagaataacggtcagggcagccgaaacagtcagggtggtctgggccagtcaaatggtcagtaagattggctgaattgcataaccaaagggcgtatggaaattgttaattcatttttcatgcgtccttttttaaatcaaaattaagaaaattgtaaattgaatacagacagggattggtctataatagagagtaatacaggaggatgagcagagttaatgagcgattataataacgatgatataaaggacactgaagatgaacagaaatacgaagatgtctgctatatgtgcagacgaccggagagtaagacaggacgtatgcttcatattccgggtatgaacaatatgtgcatttgcattgactgtatggagcgcagcttcagagtcatggatggcagcaactatgcagatctgatgcagggtatgaatattcaggatatttttccgggaggtctgaatatggatgatatgatgaatatacagaatcagatcccgaagaagcagaagctgaagaagaaggcgaaggatggtgaagaagcccatccggaatttgatataaagaatattcctgcaccgcacattctgaaggcaaagctggatgaatttgttatcggacaggatcaggcgaagaaagcgatcgcagttgccgtttataatcactacaaacgtgtggcaacaaatacaatggatgatattgagattgagaagtccaatattctgatgatcggtccgacaggatgcggcaagacctatctggtcaagacgctggcgagacttctggatgtgcctctggcaatcacagacgccacatccctgacagaggccggctatatcggtgatgatatcgaaagtgtcgtatcgaagcttctggcggctgctgacaatgatacagaacgtgcagagcgaggcattatatttattgatgagattgacaagatcgccaagaagaagaatacaacagcccgggatgtcagcggtgagtctgtacagcagggccttttgaaacttctggaaggcagtgaagtagaagtaccggttggggccaccagcaagaatgccatggtaccactggtaacaattgatacaagaaatattttatttatttgcggcggtgcattcccggatcttgagaatattgtcaaagaacgtctgaccagacacagttcgatcggtttcagtgctgagctgaaggataagtatgatcaggataagaatattgtcagcaaggtgaccatcgatgatctgcgggcatttggcatgattccggagtttatcgggcgactgccgattacggtgacactggaaggcctgaaccgtgatatgatgatccgtattttgaaggaaccaaagaacgctattctcagacagtaccagaagctgctggcgctggatgaggtggatcttcgatttgatgatgaagccctgggtgttattgcggataaagcaattgccagaaagacaggtgccagagcactccgctccatcattgaggaatttatgctggatattatgtatgagatcccgaaggatgacaatatcggcagtgtgacgattaccaaagcctatattgaaggcaaaggcagtccgatgatcgctatgcgcggaacacctgcattgccggagagtccgtcagcgaacaattaacagtttctatcaccgtcgatacatttccaaagtgcagaagctggttataatttccgggtaagcgtcatatagtctgttgaatctactgacaggcgggaatgaaatggcagagaattatgacgacatatcctgtgaagatgtgatttacagtgaggattaccgggattatatcaaagagtattttcaggacttttcaagtattgcgggcacgtatcatccggtctgcattgaggctatcggcagccggtatgcggtgatgcatctggcaggtgatacatctatgcagaacatactttctgactacaatatcagcatgctgccggctttatatggtcttctggggacagccggactggaagagagcggtatttcatattttcacagatcaccttatctgaatctgagaggttcaggtgtgatgatcggtgtcattgataccggaatcgactacaggcatcaggcatttacctatgaggaccgtacaacgaagatttattccatatgggatcagactattcgtgacggggagagccccgaaggctttatatatggcactgaatatacttcagagcagatcaaccgggcattggctgcagagaatagtctggctgttgtgccatctcaagatgaaaacgggcatgggacatttatagccggtgttgcagcaggaagagtgatagaatcagaagatttttcgggggcagcaccggatgcatctttgtgtattgtcaagctgaagccatgcaagcagtatttgaggcagttttatggaacggcggcagatgtccctgcatatcaggagaatgatattatggcaggcatcagctactgcattcaaaaggcacaggaagccaggatgcctgtgatcattttgctgggagtcgggacgaacagcggcggacatacgggccagtcgtatctgagtcagctgattgatgatatttccggtttcagcggtgtttgtgttgtaacagcagtgggcggagaggcagataagagacatcattttctgggcgtcctgcctgaggattcggcttatacagaggctgagatcagagtgggggccggggagagggctttttcgctggagctgtggtcgatacacccggatctctatactattgggattcagtcacccgccggtgagagaattgagaagatcacaccaattgcaggaagaagccagactattcgttttattctggatcagacggaaatttttgtttattatcagatggttgaatctctttccggacagcaggttatttttctgcgatttgatgagccgacacagggaatctggtcactgcgcatatatggcaatctggcagtgaacagacgatttcacatctggctgcctatgacaccatttatttcagatcagacatattttctgagaccagatccggatgtgacactttctgatgcagcctgtgcatcggagggcatatccgtggcggcttataatgatacgaataacagtttgtacgccgcatcgggaagagggtttacagcagattacgaaataaagccggatctggcagcaccgggagtgcagatatacggaccggttccgggaaacagattcgggaccaggacaggaacaagcatggctgcggcacaaacggccggtgcggcagctttgctgatggaatggggacttttaaagggcaatgatcttcagctgaacagtcataagatcattaaatatctgacattgggtgctgtccgcagagaaggtgttgtctatcctgatcgggcatggggctatggaagattgaatcttctgaaaactttcaatgaactggtgacaggacgtacataaaggtatataatagtaatcgagacaaagaaatttttgactatacacgacaatagccagaaatagtacatacaattcatacaggagggtaatattatggcattttttgatgagcttaagaaaaatttatcaggcgtaacagacacagttgcaaaaacttctgaaaacgtgatgaagaaatccagtacagcgattgagattcagaaggcaaagctgaaaaaagtatcgttggaaggcgatatgaaagaattatatgcatctcttggcaagttgtattttgaggaatacgctgatggcgatatgcctaaggaaatggcagagttatgcgagaagattacatcttgtcagcatgcgatcaatgaagctgagcagagagccgctttattgaagggagttgtcatctgttcaaattgtcaggcagaggtggataaggatgcgtcctattgtccgaaatgcggtgcagagatcatccatgttgtagaagaagatgagaatgtggatgcagcatcttctgatgaagtggatgatgaagtgccagatggtgcagatacagaggattcagaaggcgaggctgaagaagcagacgctgaaccggaagaaagtgcagaggcaaacgagcaggaagatgaagctgctaaagaaacggaagagggagaagcttcagacgaatgcacagacaacgaataaacgagatgagaaacagaaaaagctgctgtcgagcaggcagcagcaagagggagaataaaatgaaaagcctgaagaaactggcgggcatgattgggcttgttattctgttatgtggcattatgaccggatgttccggaaagagactgtattcagaagaggaattaacacagatccatgatgtagttggtgctgtagaacagataacaaaggaattccagtatgtgatcggcggcagcatgcagtcgcttttggaggattcttcaagcagggcagatttgatggattatgtgtccacaaggaaatatgacccggacaagaagatcattgcattgacctttgatgatgggccgagcacagcggatacgaatggcaccagtgatcttctggatgtactggaacagtatgacagccgtgcaacatttttttgtgtcggcaacaatattaatgacaaatcaggtccgttgctgaaacgtatggtggaactgggatgtgaagtaggcaaccacagctatgaccatgcacagctgacgaaactggatgccaaaggtgtccatgatgagattgatacgaccaacgaattgattaagaaatattcaggcagagattgccgtatcatccgaccgccatatggcgcggctgataatgacattgtaccggcgaatgtatcacagccttttattatgtgggatgtagatacggaggactggaaaagtctgaatgcgtctaaggttattgccagtgtcgaaaggtacagaaaccaggattgggatggtgctgttatactgatgcatgatatccatccgacaacagttgaggcatgcaagacactgatccctgaactggtcaatgcaggataccagttagtcacggtatcggagttggcttatctcaaaggtgttaaactggaaccgggcaagagttattggggcattagtgagaaatcaactgaaacagactattagcagagcgcgttcaatctgcataattaagaaagagactgctatatgaaaagggaaagctccctgaaaacgtttcgtgcgggtgcacgttgttttcagggagctttccctttttattaccagcggccgaactcggacaactcaaggcctttattcttatccaaaacggactgaacagcccattcatgaacaaagagcagcagcgggttgcctttgaggtctttgatacgcttcatatcggatgtgccgataatcttgtttgtctcaatttcatccttattggcaatccagcggatgtattcgtgaggcattggttcaagacggatctcaacgccgtattcattgagcagacggtgcttcagaacgtcgaactgaaggacaccgacaacgccgacgatgatctcttccataccggtgttgtattcctggaagatctggatggcaccttcctgggcaatctgggagatacctttgatgaactgcttacgcttcatggtatctacctgacggactttggcaaaatgctcaggtgcgaaagtcggaataccttcaaaggcgaatttcttgccgggtgcgcagacggtatctccgatggagaaaatacccgggtcaaagacaccgatgatatccccggcataggcttcgctgataaccttacgttcctgagccatcagctgctgcggctgggaaagacggagcttcttcttaccctgtacgtgataaacttctttgtcagcatcaaacttgccggaacagatacgcatgaaagcgattcggtcgcggtgtgccttgttcatattggcctggatcttgaatacaaaagctgaaaagtccgggctgaaggtatcgatgagaccggagtcagacattctcggcaacggagagcttgtcatttccaggaagtaattcaggaaaagctcaataccgaagttattcagggcagaaccaaagaaaacaggtgagagctgacctttggagacaagatccatatccagttcatcactggcaccatctaaaagttcaatatcatctacaagtctttcataaagttcggatccaagttcctgctcaagttcaggagagtccatggtcagatccttgtcggatgcggccttcataccgttattattctctgtgaaggcgtggatatggcgtgtctgacggtcatagacacccttaaactccttaccgctgccgataggccagttgatcgggcatgtatggatgccgaggacggattcgatatcttccattaggtcaaatgggtcctgggcttcacggtccagcttgttgataaatgtaaaaatcggaatatggcgcagcacacaaaccttgaaaagcttgatagtctgagcctcaacacccttggatgcgtcgataaccatgacggcagaatctgccgccatcagtgtacggtaggtatcttcagagaaatcctgatgtcccggtgtatccagaatattgatacaataatctttatagttaaactgcataacggaagaagtaaccgaaatacctctttccttctcaatttccatccagtcggagacagcatgctttgctgttttctttccctttacggagccggccagattgatggcaccgccatagagcaaaaacttctctgtcaatgtcgtcttaccggcatcgggatgggaaataattgcaaatgtacggcgtctttctatttcctttttaaaatcagccattttaaatcctccattcaatctctgatattttagcgtgaacagggcctccttgtcaagaaaaaggcggatatccttgcaaaatagcgatttttacggtatattagacaggtatagaatttttttgaatataaggaggattggccgatggcaagaatcgctattgtgacagacagtaacagcggcatcacccaggcagaaggaaagaagcttggcgtttatgtattaccgatgccttttgatatagatggacagccgttttttgaggatattaacctgacgcaggaacagttttatgagaagctgacgggagatgcggatgtttcaacgtcccagccgtcaccggatgcggttatttccttgtgggatgatcttatgaggaataaagggtatgatgagatcgtccatattccgatgtcaagcgggctcagcagttcctgtgctacagccatgatgctggctcaggactatgacggcaaggttcaggttgtggacaaccagagaatttccgtgaccatgaagctttctgtactggatgccatgaagatggcagaagacggtctttcagcagcagagatcaaacggatactggaggagcagaagtttaattccagcatttatattatggtagatacattgaagtatctgaagaaaggcggacgtattacaccggcagcagcagcccttggtacattgctcagactgaagccggttctgcagatccagggcgagaagctggatgcttttgcaaaggccagaaccgtgaagcaggcaaagagaattatgcttgatgcgattcacaaggatatcgagacacgtatgggcggcgaggtgaatatggataatctccatattgcagctgcttatacaccgggagaaggtgttgaacagtggcttgaagaaatccgcagggaattcccggacaaggagattgtggtagatccgctttcattaagtatatcttgtcatatcggaccgggcgcgctggctgtaacagtgacaaagaagacggaatattagaaatgcgtacatatactcatgtggtacatgatctgacacccgtttatgatgagcattcgcggatattgatacttggatcgctgccttcggtgaaatcccgggggcagtttttttataatcatccgcagaatcgtttctggaaggtgctggcagcggtgacagaccatgcacctttagaaaatgtggaagaaaagaaacaatttctgctggagcatcagattgccctgtgggatgtgatcgccagctgtgatattatcggctccagcgacagcagtattaagaatgttgtggcgaatgatatcggcagggttctctcggaagcatctatccggcagatatttgtcaatggtcagacagcgtttaaactctataagaaatatgttcttccggaaaccggagtgatgccggtgtgtctgccttccaccagtccggccaatgcggcctggaatatggagagactgacagaggcatggcaggtgattgtcagagaatcgtaaggcttctttcattgttttcatgcagcaggtatgttataatctgaatataagatgcatgaaaatggggacaaggactgggctttgaggcacagggagaaaggaaaagggaaagtatgaagaagcgatttttgggcatggtgacggcagggattttggcaacagttatgctggcgggctgcggagcatccgcatcaaaggtaaccgcagaatctttattgcaggaagtccagagtaaatgtgatgcaatgaagtctttggagacacacacaacagcggagatcacacttgagtcagatgctcttggcggaaccatggatatgactatggatatgaccatgcagacaaccatagaaccggttgctaactacctgaagggcaatatcagtattccggggctgggtacagcaatggatatggagaattacacagtggtccaggatgaccagattctttcttataccggtatagcgggccaatggatggtgtctaagatggcctatgacaaggattctgtagagagaatcaatgctgcagcagaagatctgcttaagagcaaggattctctgaagttagcagacgagacacaggatgtggatggcacggaagcctatatgatttccggcagtatttccggtgcagatgtgaagaatctgctgagttccatggagagtacacttggcggtctgactggtgatacagagatgaatctggatgatatcaccgtggactttacctatgctgtcagcaaggcggataagatgccattatatatggatatggtatttagtggtctgggtgccggtgagggtgatgaacaggtgacattcagcaagttcaacatgaagatggaatatacgaattatgatactgtagaagccatcacggttcctcaggatgtcgttgattctgcaatcgatgtgacagattatctgaatgatcttcagaatgagacatcttcagatacagaatctgaaacagcagcataatagaaataaaagaaagacagcgcatacgaagtgtgtcggaaacagcaataaccggacagggtggatcatcaatctgtccggttatttttgcgttcgcgtttcagatcacctgtcttatgaataaatttattgacactgccacatactacctgtataagatgtgtgggaattcagatgaaaattgatgtctgtgcagcagaccggaattccgtatcgggacccatgggcgggtcgcggatgaaaatagacagtaaacaggaggaatggcattatgaaggcgacaggaattgtaagacgtatcgatgatctggggcgggtggttgtgccgaaagaaatcagaagaacgctgagaatccgggagggtgatccgttggaaatatatacagacagagaaggcggtattattcttcgaaaatattcaccgattggtgaattaagccagttttcaaaacaatatgcggaggccctggcacagaatactggctatattgtcagtattacagaccgagaccggcatattgctgcggccggttcggggaaaaaagagttgatgcagaaagagatcagccgtcagttggacaatctgatgaaccaaagagagaatcttctggctgtgaaaggggaacgaaaatttatttcgattacggaggatggcggagaaaattatacagcacaggtcatctatccgattatcgcagagggagatgccatcggcaccgttattctgacgacaaaggatgaaaaagtacggatgggtgagatggaaatgaaactggctgcttcagctgccagttttctcgggcgacagttggaacaataagacgggcgtcgggggacaagcggcacaggcaaagttgcagagaacataatttccttgattttagcctgtgccattgctataatcagaaaagaaatttcttgaacagaggaaaaaggcaatgagtgagaaccaattatattttgcacccatggagggaattacaggcagcatttaccgaagagcccatcatcggatattcggcggtgtggacagatattatgcaccgtttatatttaccaatccaaaaggaaaaatcagcaaaaaggatttattggaaatcgcgccggagtacaatgagggatgttgggttgtcccacagcttttgtcaaattgtgcagaggattttatagccacagcccatacattaaaagggatggggtatgatgaggtgaacctgaatctggggtgtccatcgagtacagtggcatcaaagggacgtggctctggattccttggagaaaaggaggcgctgaaagctttcctggcagatatttttgaaaaaacagatatgaagatttctttgaagacaaggatcgggctgaaccgtgcggatgagttcgatgacatccttgacatttatcaagcctttccggtggaaatgctgatcgtgcatccgagaatcagaatggactattacagcggtaagccggatatggaagcctttgagaaagcgagtgccagaatgccttttcctgtttgctataatggggatatatttacagcagcagcttatggacgtgtcagtgaaaaatattcagatatccgtcattggatgataggccgggggcttttgtctaatccggcattgtgtcgtgaaattcgaggcggggattgtgcgtcccgggaagaactggcggattattatcatacaatgcgggatgaatatgaagtacgccttcagggaaataagaaagttgtttttttgatgaaggaattctggcattatatcagctggatcctttcagaggaggaccgacaggaaatcgatgtactgatgcatctgagagatggagcggaattctttcggaaagcggaagaaattgcggtaaactgtacagtggtgaaaggacaggggtttcattctgagatggaagtacataagttttagggtaaatgacggtgtaataaaaggacggtggaagccgtccttttatttgttgacatcaatatagctgtaaagtgtatatttggagatgccgaaaaagtttgaaattttgtctccggattttgtaatgagaaatgcaccggcatcattcagaaattgaatggcgcgcactttatcatccttggtcatcatggccaccggtttgccgaccagggtaacagactggcgaatcagatcttccagcagatcattcacattctgagggatactttcaggttccttcttatcatcttcattggcaaccagggatttcagcgcctgttcggccagcagcatgcttgtaatatcgtaattgatagacagaataccggtaatcttctgctctgtgtcatcatgaatatagattgtactggacttcaaaatacgtccatcgcctgttttggtcaggtatgccaggtgatctgttggagcagaaccccgagctcccattgccttcatggcttccagaacaacgtgtgaaggaccgtctccgactgcacgatgcgttacatgtccgttttcaacaagaacaacggaatgttcaatatccgtagatgtcaggtcgtggagaacgacttcgcagttatcaccaaactgtttggcaagcgctttcgctaattgcctgaaaaatggcagattgagtgtcataaaattgtgtctccttcctgcaaatatgattacaatgcacagtaatattataataatatatcaatttttgtaaaaaattgcaaggaaaaagacaaaaaagttttggacagcaacaatttttttgcaactgttttattgtaattaaaaatgaaacatagtaattaaaaatgaaacaaaggaaattttgagaattatcattttgtaatgtttaatgaaacaagtggaaaaatggaaattatcattttgtaattcataataaaacaaaagcagttatagcagcatctgaacaggatactgctataaataccttttgaagttagtattgaattgttccgggttcataaatgatgtcagttttgggggctgttccgtttcgtataataagaccagaacgataaagttgatgctctgtcataaaaaatagatgataaaattgtgtattctggaaacaaaaatctttatagtatgttatatcttgaattttattaaggatagaatcaagttcacttttatggatattaggctgttcattgtttatagtagcacatatacatttataatctgattctgataggtatttaatggtaggtaagcctgcatcttcttgactaacgagtgtagagtgaatacaagtagctaagacatattcaagaataaggggaggaatataagcagtattgctttttagcaaattatataaatcctgaatagcggggcacattttggcagacttgtatctaggcgggaaatatgctttgagcttttttggagtgtattgtaataaaggttctacacaatcggcgagtctttctgaaacaaaatgaataataatattgtttgtaagtaaatcctgggttaatatagaatcagacaattgtaacatatagttttcatctccttaattaaattgtgaattagtatgtacactatataatatgaattattagcatttgagcgacattgtatttgcgggtgttttctatagatgtaaatctaaaactattcatggaataagaaaactatttatggaacaaaagagaagctgcaattagcaaaatgaaacttgagtggaacagttcttaaaataatagcttgtataagtgaaacagttttggaacaggctttgtagttcaatagtaattttataatgttaccttgaaaaggcattctttataagcagatatagagctgtttataggggatgccttttatttttactatgaactgtgtattcaaaattgaacgataagttcaatacgcgagccgtaatatatgctaaaataaatatgaagggtattgttagtcagcatataatgcagaaaggcacaaatatggatgatatggaaaagttactgacaattaaagatgttcaagaacatttgcaactcgggagaaacagggtatatcagcttataaaaattgaatcttttcctaaaattaagatagggaacacttatcgtataccgaaaagagagtatcttgaatgggtacagaataatataggaaaaacggtttttctttaaaaatgtattggtaaagggaaaattgaaaacagagataaaaagacgactattgcagataaaactgtgatagccgtcttttggtctataagcagtgattcattttaaaggtatctaaatcgaatatatgattatatgtcttgtatcgggctgtcatagtctataaacgggatttttggtgattcaagatcgggtataatatctcgcatgtgttccagttgataatataatacatccaacaatctggaatgcggttcaaataacaatttggtgtataaaccatcgtaatctaaccgcaacccaatacccgcttcttctgcctgctcaatgaaattgctgctaaaaggctgggcggttacatgttgaatgtgttcctcaaacggaatatcacaaggatagtctcgatagttgctcagcagagccgccccgttgtcaaatataggagccgtacgacatttaccagtttgattattgatgacgatgcccaggttgttaaaatgcctatcaggattcaacagcagtgcatctaatgatagaatctgagataaatattcggaacaatcgtattcgagcgtatcatataggaattcttttatgtagtttatccgttcagcacaggtatcataggttcgtataatattgtccaatgcaactccgtctcggactagttcatgcagtctatggaaactcaaaaacgattcgttgtcaagaagaaaatttcttgacacacatcccggaacgtcatcaattgtgcaagttgcataaaagacgtaattggtgatatttgagtgcatgagaaccagggaagcaagatgttcggattggtcttcgcatccataaacattctttttgtaccaatagccgttatcatagcattttggctgaatgccgacagcacttccttgaacttttgttaatgtcgttgcatcagtatgaattaatcccatattaattgcctttctatatatttttggaatcagtaagccgtagttccaggcgcataaacgatagattctttagttccgattccaagataactgttggtggcagatttgtaaagctgcagctctgtcatatcgtctaaaaattcaaaatcccagtcatcgtaaagactttcagggtacatctctaaatcctctacaaatacaaaaaattcgtcaagcgattcgagctcaagttcatgactatctttttgtaaaatttctttgatttcatcatgctgcggaatagttgaaatggttggtatatcgaattcctcgcagtaactgatttcttccagtaatgctttaaaaagaacatatttcatgatcagcggcagagggtagaaattttcactcttgagcagagaacaaaaatcattaataacaggcagcatcttcttgtgtctgtaccttgcaggaaaaaagtgtttcaagccttcaatgtcataatcagtcattggctcgatgatatcatataatctttttgaaatgaattttgaaaccagttcgttaacatgaggctcttgtgttgttaaataatcagataattgaatcatagaaactcctttcgtagtcggtgaaacagtatatattctattgtatctttaatatggattgttgtggttgcatatggtgcaaccttttcaatttctgtaaaaattggccgtctgcactttttgctaatgtaaaggcaggaaggagtggtaggatgcagagtttcaaagaagtatatgaaaagtataggggaaaacggtcagatgcagcggttgcgaaaaaggcaaatcttcataaatcaacgttttcacgaataaaaaatgaacttattcctccgaaacgaaattatctatggtcattagctatgtctctggaactgacactggatgaggcagacgaattattttcttcatgtggattgtgcatggcgtctcagtaccatttgactgacatggaaaaagaaagagaaggtattattaaagactgcatagctaagggaaaatatagtgttgtggaattgaatatccgtctgtatgaggcaggatatcagttactgggaaataaaggggctaactagaaaaatatttaggcagggttgcacggcgtgcaacccttttatgatacaaagaaactataataatcgtgtggaatatatacgagaaagggggatgatttatggacgaatcttatatgcgtgagtactttgaacgaaaccaggaggtattctatatgcggtttaggaaagatgaatctaagtgggcgcttgaaaaagagcgtgcgcaggcagttgattctttcagggaaaaatacgttcatggcaatgttatggaagcagattttgaggcaatggttaacgcaatctggaatgatgattatgaggcacatgtattaatgttcctgtatggagcaggtgaacgagaaaaaatgttgagttagagaaggaggaatgagaatgggatcgtttgtttatatgattgcaagagatgatgcggacattattgaagaaaaacgaccggaatttgaagaaaggctggagaaggtgtttaatgcagcaggtatgatggaacaggagcatctgactttatttggtaaaggaattcgtgcattgaggcctgttcggatcgagaacggttatacaacattcttctataattattttgaagatgatgtatgggaaaacgcaggatattacaacaaaaacggtggcgtttactcagaaaaggttggctggcggaactttgcgcgtgctatagaggcggcatatatgctgcagatgttgtatatgcaggaaccatcgtttgttgtttataataacgaactggtaccgccatggcaatatctgcaatggttcaagaatctatttggaacaacctatcagttgccggaaaaggatttgatgaagctgattgagatgctgcatgaggaggaaaggtcttatccggaaatttattacagttataatgaattgatatgcagcggatattatctggaaagtgttatcgatgctattgcggttgtgtatggaacagccagggctttggaactgctgaaaaatgctttagataaagagaacagtaagaaagcgggtgtaaactatccggaatgcattaaaaataccgtaaggagtctggaaaaatttaagggaaatagcagtctggatgatgatggacaggtcgattatctcatgaaaaagatgagaaccatggttgaaaccgggacggtaggagaccaggaagatcaaggcattatggagatattgttctgggtgagagtaagcggcagctatgcgtttgcaattaaaagaattagcgaattatataacagagatttttgggaactttatgcaccggttgccggcatgaacaagaagcggtcattttcagaaaatctttggagtgaaacacagagtttgctgatcagcggtatttcaactgccgaatttgttaatgagagtccggatgatatgctctattattggacaccggatggagatatagaagtttctgatgatgttgaaaagtggttttcggaacttagaaaacagtttgatgaatatgtggcagagtggcagcagataccgaagctgatgcgatacattgtagatgatcttttatttgcggaccgtaattatgttaatatccggacattctcagggtttttagaggaaacgatggataatatatcagacgtcaggtatcatatcctgtggcgtatttttcatgatatgatccatgatccggatatgctgaaagaaggcagcgttatttttgataaagagtcattagccaatgggaaaaagaaacttagatatagctggaagatgacggatacgaatttgaaacgaaacaaggcaagaatgacgataagaaggtatctttcactgatttcgaacaaagagcttaggaggagagtttttggattttgagtatccggttattgataaaaagaaactgggcagcaccttaaaaagatatatgcaggataggggattgactgccagagatgtacaggaatatctggggttagcctgtgtacagacagtttatcggtggacagccggaatcagtataccgacggtagataatctgtatgcgttgagtcgattgatgaatatttcaatagatgcgcttgtaggatcaaaaagtaattagaaaaagtattttattatggcacttggcagtttgtcaggtgtcttttttttgtgttgcaatgtgttgaaacattacagaatgaggttaatatgttataatgatcatatgaaattttatagagattgagtaaaattatttcattttgtagatgaatgaatatcatcagatgctaagtcgcgaaatatctgcgaataaggtattgtatcgcaataatgatatactagatagtagataaaggtgtttctaatttggaaagaacaaacttggaagaacgggtgtaatgtcgccgttatatacggtctttcgcccgcacgatgttgacacgacttatttggagcatttctttaagtgtgcttattggcattcgtttatgaatttcaatggtgactctggtgcaaggtcagacaggttctcaattaaaaatgatgtgttcttccaaatgcctatacctctaccacatatagatgagcagaggaaaataggtgagctactaacttgtcttgaccaccttatcacccttcatcaacgtaaagaaaaattaaaggataacaatacatagttttgacaatgatattttgaaaaattttataggaatgctctattatcaaattgacataggaatatggtagcgtataattagaattgaatacactgaaaaatggaggaattacatgaaagcacataaatattggtcagtaggagctttaatcacaatgattggaactttttatacaggatataaagggttaaaagcagcacacaaatactttgcatttggctctctgatatgcatgattatggcagtctattctggtcataaaatgatttcgggtaataaaagaacaagaaaacaggtgaaaaatacaaaagcggaggaatagtaaatgttagagttaggaataaaagcaccggattttgaattgccagatcagaacggagaagtgcataaattaagcgattatgcaggaaaaaaagtgatcttatatttttatccaaaggataatacaccaggatgcacgaagcaggcatgtggcttttctgagcgttatccacagtttactgagaagggagctgttattctcggagtaagcaaggactctgtagcgtctcacaagagatttgaagaaaaatacggactggcatttacgctattagcagatccggagcgtaaagttattgaagcatatgatgtctggaaagaaaagaaaaattatggaaaagtatctatgggtgtagtaagaactacatatcttattgatgagcagggaatcattataaaggcaaatgataaagtcaaggcggcagatgatcctgaaaatatgcttaaggaattggcataatgaagattattttatcacctgcaaaaaagatgattgtagataccgataacttagcaccggttgaactgcctgtctatattgataagacagcagaagtattaaactggatgaaaagcaaatcaaaagaagaactgaaagctatctggaaatgtaatgacaagattgcagagcagaattttaacagattggaaaatatggatctttataacaggcttactccggctgttttagcatatgaagggattgcatttcaatatatggcaccatctgtgtttgaaatccagcagtttgagtatttgcaaaatcatttaagaatcttgtctgcgttttatggcattttaaaaccaatggatggtgtgactccttatcgtcttgaaatgcaggcaaaggttggaattggagatgcaaataatctgtatgagtactggggagaattgttataccgctcagtaatcgatgacagtaggattatcattaatcttgcatcaaaagaatactcaaaatgtatagaaaagtatctgacaccacaggacagatatattacgattgtattttgtgagttatccggagataaattggtaacaaaaggtacctatgccaagatggctcgtggtgaaatggtcagattcatagcggaaaataatattgaaaatccggtggagattcagaaatttgacagactcggatattcgtttaggtctgatttatcttcagattcagaatatgtatttgaacgcaaaataaaataataataataataatgagaattattactatttttgttgacaacaggataatagtggtgtataatccttattaagaactaatcctaataaggaggacgaatgacaagtaggagaaataccattcaaaaagatcttgtaagaaataccgtatacgaaatgagaatacacgttacggcaaatgaagtgtatgaatttataaaagaagcatatccaacaatcggaaaaggaactgtatatagaaatcttgatatattggtagaggaaggtgcattaagaaaggttgaagttccggatggaccgaaccgatttgattttatattgaaaaatcattaccatgtaagatgtataaagtgcggtgaaatttttgatgttgatatggatgaaataccggatttgctggaaagaattcataacactcatggaattgaatttttggattatgatatttcgtttaaaggcatttgccccaaatgcagggagaaggtaaagtaggaattaccagatgactttatatgtcctttgtgcaagcacccggcatcagattttgaaaaagtagtaaagaaaacggaggtgaaagagatggcagcaaacaaatatgcaggaacacagacagagaagaatttacaggaggcatttgcaggggaatcacaggcaagaaataagtatacctattttgcttctgtagcgaaaaaggaaggttacgagcagatgtcagcattgtttttaaagactgcagataatgagaaagaacatgcaaagatgtggttcaaggaattagcaggaattggtgatacaaaggaaaacctggcggcagcggcagaaggcgaaaattatgagtggacagatatgtatgatggctttgctaaaacagctgaggaagaaggattccctgagcttgcagcaaaattcagggcagtaggtgagattgagaaacaccatgaggaaagatatcgtgcacttcttaagaatattgaaactgcacaggtatttgaaaagagcgaagttaaggtatgggaatgccgtaactgcggacatgttgtggtaggaacaaaggcacctgaggtatgtccagtatgtaaccatccacagagttatttcgaagtacgtgaagagaactattaaagagaaggagattattacaaagaagaaagtgattattaaaaaaagcagtaatgataggctgtggctttgttggttctgcatcagttggtaaagaagcattaaagtttaagaaatcggcggatgctttgaaaaaagttatagaaacaattggattttaaattttaaacataggagataaaaaagatggaagtaaaatattatgtatgcaatcattgtggaaacattattgaaaaggtaaaggataagggtgtacctgtaatttgttgcggagaacctatgcaggaattaaaagccggagtgacagatgctgctgtcgagaagcatgtacctgtatatacgatagaaggcagtcatgttcatgtcgtggtcggagagacaaaacatccaatgcttgaagagcatttcattgagtggattacattaaatacaaaccagggaatatacagaaaacagttaaatccagggcaggagccggtagcagatttttgtctttgcgatggtgaacaggtagaagaagtatatgcatattgtaacctgcatggattatggaaatgctaaaagcatttatacatattaaggttacagaacaacacaaatacaacagtaatatatgctgtgtattaatatatttataaggaggaacaaactaatgaaatatgtatgtgacgtttgcggatgggaatatgatgaagaggaaggttatcctgaaggtggtattgcaccaggaacaaagtgggaggatgttccggaagattttgaatgcccattatgtaatgttggaaaagatcagttttcagaagttgaataaaattctgattatttaaatacggatagataaacaaaaaccctggtgtgtgtgagcaacagggttttttattgcgatagtttgtgatgatatcacagaaaataatttaccttttgcttataatgtaactacaaacaaagtaaggaggtagtctaaatgagattaaaagataaagttgcaatcattacgggtggaagccgtggtataggatttgctacagctgataaattcttgaaggaaggtgcttcagttgtgttggcagcaagttcacaggaatcggcagatgttgctgtagataaattaaaagaaaaatatcccaatgcaatagttgctggaattagtccaaatctggcaagcatggagtctgtcagaaaggcttttaaagaggcaactgaaaaatatggatgtgtcgacatactggtaaataatgcagggatttcagaaaacacctcatttatggattatacagaggagacttttgataaagtcatggatctaaatgtaaaaggagtatttaatactactcgtgtagcagcagaatgtatggtggcaagaggcaagggggtcattctctcaacttcttccatggtgagtatttcgggacagccaagtggggttgcttatccggtatcgaagtttgtgttttttgtcaagcacttttccctaaaaaaagcgtcagaattccctgtttttagcgagggattttccctactttaggcacggtttgggctctttccctttcgctcgccgctactcaggaaatcgatgtttctttctcttcctccgggtacttagatgtttcagttccccgggttcccttcatacacctatggattcagtgcatgatgacaggagttcttcctgccgggttcccccattcagacatccgcggctcaatggatatttgctcctccccgcggcttttcgcagcttatcacgtctttcgtcggctctcagtgccaaggcatccgccctgtgccctatcttgcttgacctttcgtgccttttttgaggaaaatcccttgccgatttcagggatttttaacgcttttttctggtaattttagtgtatcataaacagatacagctgcccgtgcagacacaggaagctttcacaggcccctctatccgttggctgatgaaacttcgggaatactttggtccggatcttttcaacctgtctgggcaaggcgtgtccggatggcgcagaaatatggtcaggctgaaagcatgcagcacctacgtgtgcgtttatataaatgatggaaacggattgtctccggcattgcaaggaaacgaaaataggataccttatcccatatatctggaaaggctttgcgcagaatattagctgccacgttgcagtctgcattaatgcagtacccaaggctgcacagataacaaggacaagaacagtatatattatggaagcgggaataaatatttgttgtggtcaagctttttttagcccttagtgttacaaaaaagattgaacatttgaaaaatgaacttaaaatagcaaaaagaagaatgccagttttgggaaagattttctcaagaagaaataagaaaaaataaataactaagtgatttaatacataataataaccaacaataccacctcatctgcttcaagtgcaaaatcaggtggtattgctttgtttggaattaaactgttcagctattcagcagattcggaagaagattcagatgaaaattcggttgtatttggatagaccgtttcgtcaagaactgtaatttcttcagtaacatatgcaggtgagtatttttttataatatataaatcataaatacaatatactgcaagaataaggacaagtgttgccactattccaataataagtttattctttctcttttctaaatgatttctaattaatttctctttaaaaatagaagattcgatgttttgcgctccagcctgcataaaatcgctaatattacttttgatatatatttctatgtcattcatagtcgcagatggattatctgaaacaaaatcctcaatttcattacgaatgatatcaagaatattatttacatcatccgacgaataagcaataagtaattgaggttttaaaccctcgatatatttctctatattttcagaggtcacaattttatttttcataaatagactccagtaattattatttattaagacttaatttataacaatagttacaacattctgcgctgtaatatacataatcaaatggcctattaaaaaagtcattagtaaaagaataaaagttacaacaatccccgtcaggatcactattatccttttttttcgggtgctattaatatctattttagttataatttcatcacattctgcgttttgaatccaatccgaaaaaatatcttctgtattaacgtatgtcttaaagtcatttaaagtactcaatggattattttgtataaaatcgtcaatgctcgaattcattatttttacaatatcattcacattttcttgagaataaagtagccttaagtttttctgaacatctttcaagtatttctttttatctttgcgagaaatcccttttgcatagctcataacatctacacccttcatcattgctatattgcaattataatacaaaaagcctctttaagtaagaggctttttgtattagttatgataattttccagaagcactacaagacagggttactgttcgactaactgatcgtgtaattgcccaggatgtatcatactgtttacttgttgctgtggcagaagctaatgtgtttaatttactgcatgatagacttgatactttccaataacttgaattcgagctggctcttccggttacagctgtacattttgctgaagacccattatacgaaaatgttcctgtaaccgttacagaccaaagacttgcacctgaacttgatttataagttgctgtttttgaagctgtcttagtgcttgttgcccttgcaaatgatacagccggttcttctgtgatcgtcgttacaatatagctgccatcatcaaaatactcgtattccgccggataagtattggatggtaccggcatttcacctgcaaaagcaacccaggtcatggacagtaccgtaaccagggataataataacgccataagttttttcataagcatttttctccttttttgatgttgttgcggaatttaattccaaaagtgttggataagtttgcaagatacattttgtgccattgacaattgtcaacttcttcgaaccatttcaacttgaattataatattgtcagttatcaaaaaaatcagttataggtttttctttgaagacataactgattccatctaactattttttgcaaaaagtaaaataagcgccggcttatccagatatatgggagatatgtagtgaatgtcgtgatatttctggaagatattgacgtatgtttgaaaaagtattacaataaagtcagcaaaaacactttttgaaaaaaagtaatagaacggacctgcagggaatgttcagttttcgcaaaaaacatcataaaaaccatcatgttatacttaaaccatgaaacagatattttttaagtaaaggagcagagtgttatgaagaagtgtaaaaaccagttactggcagtcttgattgccagcaccatggccatgtccatgaccgcatgcagcggtacaccggcagagacggtgaaaccgacagaaacagcagcaacagagaaggcaacagaaagtggatcagagacagagacagccgaggcaaaagagtatgaccttgatgacatcaaagactatgtggaaggtgtcgatgactataagatctatattaaggacgcagacaagctggaacagaaggacctgttcgaacagatgaagaagctggtgcttgagaaggcaaagggtaatggacatgtagttaaatccgtcgatgtggatttcaaggaatcttccgacaaggatgaaaaagccaaagatatctatgagatgacttatattatcacagcagatgccgccgaactggcagaacatgcaggagaggaatatgccggtgacggttccgatgttgtggtcaaggtcgttttcaaggcacagcttgtttctgaggaagaagcagctaagcttgtaaaggctgacaaggaagtccttggctatgaagcagaagaaaagacgggttcttccaatgtaaagaaggataatgccgttgcatccaataagacagacagcggcagctctacaggtatctccaacaagaataactccggaagcaaaaacaattcttctattaaaggaagcagttcttctaataagaacaattccagtaacagcggaacgtccggtaaagagaacgccggttccaataaaaacaatggttccgataaggataacaaaggcaacagcagtaaagataacaacaaaaaagatgataataaaaacaacagcggcagcaatggccagaacaataaccagaaaccggagaagcatactcataagtatgtagagaccattacaaagcaggcaacctgtacagaagacggtgaaaaactgcataaatgtgcatgtggtaagagctacacaacgatcattattgcaaccggccataagtatgataatggcacagttgtcaaggaagcgacctgtacagagaaaggccagaaggcttataaatgtaccaactgcagcaatgttaaacttgaggatatcgcagcggcaggtcataagtatggcgaagccgttgttttagaggaagcaacatgtacaacacctggcaagcaggaagttaaatgtgaagtctgcggtgatacaaagacatctgaaatcccggctaagggacacagctatgatgacggtgtggtaacaaaagaagcaacatgcgcagaagcaggcgtgaagacatttacatgctcagtctgcggcgagacaaagactgaagaaattcctgcaacgggtcataactgggacgagtggacggtgacaacggaagcaagatgtgaaactgcaggcaaagaaacccgtacctgcaaaacatgcggcaagaaagaaacccgtgagatccctgccaaaggccataactggggaaaatggtatgtgctcaggaaagctacatgtacaaaagacggcatcatgttaagagactgcaagaacaattgcaattcctctgatgcaaaatctatccctgcaactggccatgactggggcgaatggaaagtcaaaacacctgcaacaggtgatcagccgggtgtcaaagtccgtaaatgtaaggtgtgcggtgtaacagaagaagacgagatctcagaacataactatggtgaatggacagttgtcaagaaagctacatgtaccgaagaaggcacaaagcagagaacatgtgcagactgtggcgatgtacagacacgttcgatccctgcgacaggtcatgaatatgtcgaagagagagtcaaagataccacatgtacagagaacggcctttggaagtttacctgtacaaagtgcggagatacatatacaaaggtagaaccggcgacaggtcattatttccagggatgggatgttttagagaaagcaacatgtacagaaccgggacttaaagaaagagtctgctgtaattggaatacagatggtacccattgtgattataaggaaacaagggagatccctgcaatcggccacgactggggaaattgggtagtcacaaaggaagcaacatgcaaagaagctggcgagaagactagaacatgctctgtatgtgacaaaactgagacacagtctattcctaagatagaccatgaatacaaagaacagacagaacagaaaaaagttgtggataaaaaagcgtgggacgaagaagtaaaaacaactatctatttttgcacaggatgtggagcagaatttaagacttcgggggaattaggaaaacatattgatgatgcatcagctggtaaaattgatggacatccaggatatggttctatgtcagatcgcgtagagacaaagattgtccaccacaacgaagaattccactacgaaacagttacaaagcatgtttgcaaggtatgtggacatgtaaaagaagattaagcattaaccagccaaaaaggcaatacgtctttttcataattttcacaactcgctttaaggctcttccggagaaatccggaggggccgatttttttgattttgtggttgctttttgaggtgctaataaaaagtatcatatttattaagtacatataatgtaggttcgagtgtacataatatggtgaataatatccttgaaagagcagactttaatgaaaacgttgatcttggagattttctccggagcttcgtgaaccgattgatgagccagatgagatacggaaaatagcaaaagattcttgaacataataaactttctgataaaataaaactgaagatttcttggaaattgagaagtttgatacagagaagctttttttctttttcaattcagaaaggtggcgcagtatgcatacagtaagtgataaaacagaagatgccattctggttgtcagtttcggaaccagctacaatgacagccgtgagaagacaattggcgccattgagacagcgattgccgatgcttttccaaagtggacggttcgaagagcttttacaagccgaatgattatccggaagctaagagaaagagatggctatagagtagatacggttgaggaagcgcttacacatgccagggaggatggtatccggcgattagtccttcagccgacacatctgatggatggcaatgagtatatgcgcgttgcagaaacagccgccgcatggcgttctcaatttgatcagctggtactcggtgcaccgttgcttggcaatgaaaatgatgaccgggccgtgatgcagatcattaccgcagatacgcaggcctatgatgacggcgaaacagcgatttgtttcatggggcatggcagtgatgcggcagctaacgccatttacagtgattttcagcagagactgcacagagccgcttacagaaattactatatcggcacggttgaagcggatcctacattggagcagctgttggcactcgtccgaacaggcggcaattacaaaagagtcctgcttcagccgctgatggtcgttgccggagatcatgcccatcatgatatggcaggtgaagatgatgaatcatggaaacgcacctttgaaaaagccggctatgaagtgacatgtattgtcaaagggctgggtgaattagaaggtatccggaatatttatgtcagtcatgtgagaaattgcatcaaacagatgttatgaaaggaaacttgaaattgattttttcctatggtatgattaaaggcaggaaaacgaaatggaggctttaataatgacaaaagtagatgttgtaagagcagaaatggtcaaggcaatgaaagccggagataaggaacgcaagaatgcattatcgatgctgttaagcgcattgaagaatgccaccatcgataagagaagcgatctgactgaagaagaagctgatgtgatcgtccgcaaggagatcaagcagacacaggagactttagatacgacacccgctgagcgtacagagattattgaggaatgcaagttccgtattgcagtttatgaggaatttgtaccgaagatgatggaagcagatgcgatagaagctgtgatcaaagagacattggctgaacttggcattgatgccccgacagttaaggataaaggcaagattatgaaggttctgatgccgaaggtcaaaggcaaggcagacggcaagcttgtgaaccagttgttatccggtatgtttgtatagatataagcagagtacacatgcgtgcactccttgaaaatccgcgggtaagttcttcttacagcgggttttctgctataaggagattttgctgtttgttatgtacaacacaagatgaagcagcaagatgatagaattgaatgacacagagaattgaataatacagagaacagaaaggacagattatgagaataggaatgggatatgacgtacatcgtcttgtacctgatagagatttaatcatcggaggtgtgaagataccctatgagaaaggattgcttggtcactcagatgcagatgtcatgctgcacgctgtaatggatgcactgcttggcgctgctgctcttggtgatatcggcaagcactttccggacacggatcctgcttacaaaggaatttccagtgtcaaactgttggagcatgtgggcaaactgattgaagagaagggttatattatcggcaatattgatgcgacaattatcgcgcagaaaccgaagatggctccgcacattccgcagatgcgccaaaatattgcaaaggcacttaagatttccgaagatcagatcaatgtgaaggcaacgacagaagaaggtcttggttttaccggtgagggcgccggcatctcatctcaggctatctgtctgttggaagaaatcggcaattttggtggaagagatgtgatgtacgagacttcctatgacccatcagcaggcggctgtgcaggctgcggcggctgcaaacagtaggtgtgtcatgaattttgaacattttataaaaaaagaaatggaaccgcaggattatgatattctgcttccgtattttaagatgcgttactcccatacatgcgagaacatccttgtcagcaattttatgtggaaagactattatcatacccattatatccgggatgatcatggactgatctggctgatggaagtcgatggtcaaccggtgactatggtgcctgtatgtaccaaacaagatctgaaacattattttgatgtggcagaggcttattttaatgaagttctccacagcaaactgacagtatgtctggccgacaaagaggccgttgaacttcttgatcttgatcatgagaaatatgacattctgactgtccgtgattattatgattatgtatatgacgccgagaaactgagaacattcagtggcaaagcgtatcacaaaaagaagaatcatctcaacgcatttaaaaaagcctatgagggccgatatgaataccgaagtctttcctgcggatgccatcatgatgaaattatggcttttctcaggaaatgggaagcccagagagatcttgaggatcctttccatcgcgatgaatatgaattaaacggaatagattatcttttatccaattgcggttatcttgattacaaaatgggcggtatttatattgatggtgagctgcaggctttcagcctgggtgtctatggcaaagtggagaaaatggccgttatccatgtggaaaaggccaatccggatatccgcggtctgtatccgatgatctgccagcagtttttgtgccatgaattcccggatgccgaacttgtaaaccgtgaagatgatatggggctggaaggactccgtaagtccaaaatgtcttacaatccaatctatctggaagaaaaatatgaaatcagacaaaagtaatttgacggtccgttatgccgatggaagggatacggatgcattatataagctgtggaaagaatgtttccatgatacagatgcctttatggcctattattttgactactatttaagagataaccggattcttatattggagcaggagaatcagttgaaatctatgatccatctgaatccgtacacattatctgtctgcggaaagaaggtcaacagcctatatgttgtcggcgttgccactaatgccgacttcagacattgcggtgctatgacacggcttttgcagcggactttttccgactgctatgccggtagaatacctctgatctatctgatgcctgcgaatgaggctatttatacaccttttcaatttgcatacatttacagtcagtatgtggaaaagaaaacgcatacgcctttttcatccatccacaatgttgatgcagcaattgtgagggatatttccgcacatcctgtttcttcggaagcagaaaggcagcggctggcagactggtctaattcgctgctttcacgtcattatgatgtttttacccggcgtgatgcctattattttgaaagactgcagatggagaatcaggcagacggcggtgatttactgctattatctgccaatggcaaacagatcggctatgtctcttatgcctgcgaagaaatcatggaaattcgcgaaatttattgtgaacccgaatggcagtctgctgttggtcaatgggtgcttcaggcattccgggacaaagaaggagaactccttcccctggttcaggcaccttttatagccgatgcggcggatgtccgcggtatgaaacgtccgatcattatggggcgcatcattgatgttgcagaatggatcaaatgtatgccgatccggaatatttcactggatatagctatcagtatcattgatagatggattccggagaatgaaagcacatggtattggcaaataagtccggagggcaattcatttgaacgtacggaagggccatgggacatttgcctggatattgacacatttctgcaatggctttcaggatacattcccgtggatgaactcatccgtcagcaccggattttgctgcgcacggattggcaggaaaacgacgccatgcatacattggaacagattcctgtcctgcatggtctgatgatcaatgaaatcgtgtagacagatgccaatatctgacataaagaggttgacaaacctgcattttttgcatagactaaacttcagataaatgcaattatttatggaggaaatcatgaaaatattcaatacattaacgagaagaaaagatgaatttgttcccattgaagaaggaaaggtgcgcatgtatgtctgcggaccgactgtatataattatatccatatcggcaatgcacgtccgatgatcgttttcgacactgtacgccgttattttgaatataagggatacgatgtgaattatgtttccaactttacagatgtagatgacaagattatcaaaaaggccaatgaagagggcgttgatgcctctgttatttcagaacgctttatcaaggaagctcagaaagacatggcagatatgaacgtaaaagaggctacacatcatccgaaggcaacagaagagattgacggtatgatcgatatgatccagacattgatcaacaaaggtcatgcctatgccgtggatggcactgtctatttcaaaacccgttccttcaaggattacggcaagctttccaagaagaacattgatgatcttgaagccggccacagagaaatcaaggttaacggtgaagaaggcaaggaagatccgctggatttcgttctctggaagccgaagaaagaaggcgaaccgtcctggccttcaccatggggagacggccgtccgggctggcatattgaatgctctgtcatgtccaaaaagtatcttggtgaacagattgatatccatgccggcggtgaagatctgatcttcccgcatcacgagaatgaaattgcccagagcgaagcctgcaatgacaaggaatttgcacattactggatgcataacggtttcttgaatattaataacgtgaagatgtccaaatccctgggcaatttctttaccgttcgtgaaatcgccgagaaatatgatctgcaggtactgcgtttcttcatgctcagtgcccattacagaagtcctctgaacttcagtgctgaattaatggaagcatcacgcaatggtcttgaacgtatcctgacagccgttgatcgtctgcgtacattgaatgtacagggagaagcattcactgaggaagagaacgaacagatgaaagtatttgatgcccttgttgccaaatacgaagctgccatggaagacgatttcaatacagcagatgctatttctgctatttttgagatggttaaggcagccaatattcatgtaacagagacttctacagctgctttcagagatcagatcctgtcagaaattgtcagactgtgtgacgtacttggtattaagactgagaagaaggaagagctgctggatgatgagatccaggcattgatcgacgaacgccaggcagcaagaaaggcaaagaattttgcacgtgcggatgaaattcgtgacgagctgcttgcaaagggcattattctgaaggatacaagagagggtgtcaaatggagcagagcttagaatcctttagtacatggtttcgcgaactttatcatttggacaagccggatgtcagggaatattctgccctgacactggcctatatcggtgatgcagtttatgagatcattatccgatcttatattgtgggcaaaggcaatgcgccggtagagcgccttcacaagcgttccagccgtcttgtaaaagctgagacccaggctaaccttatcatggctattgaggatcagctgacagaagaagaacatgccgtctacaaacgcggacgcaatgccaagtcttatacaatggccaagaatgccactatgtcggattacagaaaagcaacaggctgtgaggctctggttgggtatttgtacctgacggagcgctatgaaaggctgacggagctgattcataccggccttaaagcacttgccctgatagattagatgtctgccaaatcatacagatcaaatgagacagcagatatctctgaacaagaatataacgcgaggtaaatatgggatatacagaattaaaaatagaaggcagaaatccggtcattgaagcgtatcgttccggcaaaaccatcgataagctttttgttctggacggatgccaggatggccctgtcaaaacgattacacgtgaggccaggaaacagcataccattatcagttacgtatccaaagaacgtctggatcagctttctgagacacatcatcatcagggagtaattgccattgcagcggcttatgattatgcatccgtagacgatatactggccaaagcccgtgaaaaaggtgaagcaccttttatctttcttctggatggcattgaagatccgcacaacctgggtgctatcatccgaacagcgaatcttgccggtgcccacggtgtcatcattccgaagcaccgcgccgtaggtctgaccgccaccgtggccagaacatccgcaggtgctctgaattttacaccggttgccaaagtgacgaatcttggagcagccatggatgagctcaagaaagagggtctgtggtttgtctgcgcagatatgaagggtgaagtgatgtatcgtcagaatctgacaggcccgatcggtcttgtcatcggcaacgaaggcgaaggcgtcagccgtcttgttcgtgagaaatgtgacttcacagcatcgatcccgatgaaaggggatatcgattctctgaatgcatctgttgctgcaggcgtactggcttacgaaattgtcagacagagaatgggaaaataaaacctgccaatagaataagacttcgcacctgatgacaaaaagtgatgccaaaaaggtgcgaagtacttaaaagtatttcttgacatgagtctatcttatatgatatagtaatcaacggacaattcattttgtttgctgatgtggctcagaggtagagcacttccttggtaaggaaggggtcacgggttcaattcccgtcatcagctggaaagcggttttcttaggaaagccgcttttttgctatatgtacagaaaaagcaagcatttcagagtttcctcggggtgcttgctttttcttatttttgcattaaattgtcatcataaagcattgttttgcaaattaatatgacacggaatatgacacgcttcacagagacgagaagtgtttgttgataagccgattcattttgacagtctgctcatcaatagcatctctgtagacggatttcatgatgccgtctgtagcccatccaccgcgctgcatgatatactgatctggaacaccgatagcatgcatgatgctggcggcataatgtctgagatcatgaaagcggaatggtgaaagattgttcctttggatggtacgatgaaaccggttggttatgttatccggattgcagtcaaaaatccggccttctttttggggaatgtgttctatgacaaattccgggaagtctactgtacggaaggaagcatctgtttttggacgcggctgaacgtgccagatgccgtcagaatcctttaccatgcatttattgacagttatatagttatcatgtacatcactgctttctaaggcgcacagctcgccacggcgcaatggaccgaaggcggccagtaagacagccaagtaaagctcgtcatcatcaatggcagccaacaaagcttttatatctgaatcagatggtgtataaagctgtgccggtatttttcttggcagagttacgctgatcctgagttccggagcaaacatggcaagtgcagccatcaacaatccgttcacgttggatacagttttcggcgaaagtcttcctgccagacgattgatccattcctgtacgacaggcgtagtcaatgtccggatccgtatggtttcgatacttttatagtagtttttgcgctgtgtctgataacctctgatcgtactgcgagataaaacttctgatttgacacgtatgtattcatcaatagcctcggaaacggtcagatcacctgcagcaatgcgggatttgttctgtgaaaattctgctgccatgtaagaacattctttcttcgttgcagcagtgaaagagcggtagtgcctgacatttgattcatcagtataatcatagacacggacacgccagttgcctgaaggaagttttttaggtgttgccatatgtatcactccaatctttgaaaaaaagtataaaaataacagccagcgaactttcgttctcttgcgatggctgcccgaagatgatacaatattatatgcagattaggtatctcttcggagtacttaacagaaacatattggcgtatgtttcatcctatgaccgttcctgttggcgcaggagcggttttttattgtgtaaaagcattttgatagtcctttttcaatcaagattacgcagttaatagttctattttttctgaacgctgactccaacgaattgaatcaacgtcatagctttcaaaaccgtcctctattcctttacttataccatttgcatcatttaaaattacaatgagtttgctgtcttgccttcgagaaggttttgtatcttcccaagcaaatagtgcatttcccattgcagcttttgaagggttatttatagcaagacaaagtctctcaggcttttcctttgagcgttgtatagcgaaatcataattatgatagaatccagattttccagtgaattgcacattttccatacaaaaaatatcattttgctggaagaaagattgaatatcatcaagaaaatatgaacccacctttgctcttgatgtcatatacatgtccgaaacacgtaatagacattggataaatgcatgttttttctgggcaaactgatttgcaggagcttttatagtaagctcttttcctttcagttggacaccgtattgaattagaatttgctgcaactgtttcttcctgttaggagtaagtgaaaaacctgtcatttcaagagagttgatggtaaaaccatcatctgtaaagtataattcattcccgtcttgcttaacataaaactgcaaataatcattgtcgttattcaaaaagggcgtatttatttcataatattcccctactttggtaaaggaaatttcgctttttaaccactctacataggaatctatatatttttgaatgtccatcttcacacctcctgtcaaaattattatactaattcaagctgataattgatagatggtttttcaattatattaaatttttccataaacaaaatcgtattctctacaaaatgttcagaatgaatgtcgtccgccggaaacgcttgcctcctgccatactcctcactatatacatgccaatgagaaccgacgatttttttaccatccggattaacatggattgtactgggattaacatgcaattctagaagcagaataccatctttttttattctagcgccgatctcatatttaacagggttgattttccctcgataaatttttgttgcaaataagtcttttttctcagaaccaacaacatcaaattctatatcatgtcctttttccgggaaagtaatcccttcaacaagagatttttttgccatgttaagcaggtgctcagcttcttcttgagtaagtttctttgattcgttcatttgtatacctctatagcctcaaaatacaatattacaacttattgtatatttgcttaaattccattatttttttatcatatccagcaattcttgcaatttgagctttgtttaatcctggattttcgtatatcaaatcatctggaatcagaagctctgctgcgaatgtgtttgcttcaatttccatctttgaagtcagcaggagagttttgtcccggataaagtagcagttctgctttcgatgtaatattgaatgagctagttcgtgagccatcaccagagtacgttcatgctcttcgagatattcatttaaaaagatacatttatgattctttaggaacatatagcatccggcacgacctccaagcggcccagtcattacttctacattcaaatattccgctaattcaaatggatttctagtatcaaatttgtctatgtaatactgaaccaactttttgatatctcgtctcaatcctaccacctactttttatttttattcggattgtatttttctttgttaataggtttcaatcgacgcatcatcagttcaatctgtccgagaagcagttctgcatcctcttctggaattggttctccatcataagataaaggaccatcggcaccgtttaataattttgcacggatagattccatgtctttagcaatatcgcgattatctttttctgttaaaccatcttcatcagctccagtcataagaaaatcagcagatacctgtaaatattcagctattaatacaagtcggtccgctggaaatacgccttttcgaagttggctgatataaccatttgaaaaaccaagttcacgctcaagacgggaaattggaattttcctatccttacatatttttttcactctatcaacgctattcatagagtacctcctaaaatttagagaaaaatctaaaataattattgacaaattagagaataccctatataatctaagcatgatttagagaaaagcctaaatagtaaaagaataattctcatatgtttctgacaattcatattttagattattctctaatatttgtcaatgtttttctctaaatctattgagaaaggaggataagattttgctttatgaaaaagtagctacactttgtcagaacaataacttaacaattgcgaagttggagcgtgaatgtaagatgggaaatggaacgattcgtggttggaaaaattccagtccatcaatcgaaaatttaaaaaaagtagccgactacttcaatactacggtgaatgagctgatcagcgaagggtaggtgagaaaaatgaaggacttattaaaaatcaattatgacgcagaacagccgacaatatcggcaagagaactttataaaagcctcgaaataagcaagagattttcagcatggtttgaaagtaattctcagggattcatcgaaaatgaagatttcaccagcgtacttgtaggtacggaggttcagaacaatggtggggtacaggtaagagagcttcaggactaggatgttagggaatgttagagtaagagatgaaattcaacatctgaagcagaatcgctatcagagagagttactttcagaatcggacatctttcagaagtacatagatattgcctttgcggatatcacagatttccttgattttggaactgaagaagtcccagttatggcattgtacgggcctgtaaaagtcaaagacccagagacaggggaagaaaaaacgctgacaaagatagttaataccgtacgatttaaagcttcaagcgaggtagatggttccattctgtctgaggtcaaacaaggaaaagatggagccagcattaaattggcggaccggatgaaagcacttgcttggttgactgcccatatggatattgccacagcggagcaacaggcgaagataaatcagattaatgctcagacggaacttctcaaagcgaaagcgcagctggatgatgatgaagaggcagctgacgacggtttccttgaagctttaaagggaactgccgctgatgattggtcagaggaggctgtgcaagatgaaacggattaaacagttctttcattttcaacctttctcaagaaagcagcgcaaggtcctgaactggtggacagagacatcaccggttaaagattatgatggcattatcgctgatggtgctatccgttccggtaaaacagtcagcatgtcgttatcgtttgtgctgtgggccatgacgacatttaacggccagaattttgccatgtgcggcaagacgatcggctcattcagacgaaacgttttgttctggctgaaactgatgttgaaatctcgaggatacagagttgcggatcatagagccgataacttagttgtcgtatccaggggcagtgttgaaaacaatttttacatatttggcggtaaggacgaacgttcgcaagacctcatccagggtattactctggccggggtcttttttgatgaagttgctttgatgcctgaatcttttgttaaccaggcaactggccgttgttctgtcgatgattcgaaatattggttcaactgcaatccggatggtccgtatcactggttcaaggtgaattggatagataaatctactggttatctgggaaagattaaaacagaacagataaaagcgaaagcaaaagccgaaggaagagatcatggattaaagaaaattctgtatctccatttcaccatggatgacaatctgagcctgtctgaggccattaaagccagataccgttcaatgtatacgggcgtgttctatcagcgctatatcaaaggtctgtgggccatggcagagggtattatctatgacatgttcatgaaagaaaaacatgtcaggaatattcaggctatccgaccaaagctcatagacgggaaccggtatgtcagttgtgactatggtacgcagaatgctacagtttttctgttgtggaataagggcgttgatggcgtgtggtactgcatccgggaatattactattccggccgagatcatgggaaacagaaaacagattcagaatatgctgacgaccttgaacagtggctggacggcacaaagatcaaagcaatcatagttgaccctgctgccgcttcttttatcgcagagttgagaaaacgagggtacagggtactgaaagcaaagaacgatgtagaagacggcatccgcctagtatcaacgatgttgaaccttctgagaatcgtctttgcggacagctgcgagaataccatcatggagtttggctcgtatatctgggatgcaaaggcggcagaatacggcgaagacaggccggtgaaacagcatgatcacgcgatggatgcagtgagatattttgtttttacgatacttggtaataaaccacatctgaacagagtaaagggaggagtctaacatgataagagtaccggcaggaacaaagatgacgccggagcttctcggaaagttgataaccaaacataaaacggaagtaaccaaccgctatcagaaattaaaggatgcttacgaaaatcattatgaaatatacggccttcggccaaaaccgagctggaagcccgacaaccggatctcggccaactttgcaaagtatattgttgatacgatgaacggcttttttattggtatcccagtaaaggtcagtcatgaaaaagaagaggttgataattatctggaatttctggacagttacaatgaccaggacgacaacaatgctgagttgtcgaaaatgtgtagtatttatggcagtgcctatgaaatgtattacgtggatgcagttggtaatatcggcattacctatctgtcgccggtagaatcatttatggtttatgatgacagcgtattgaaaaatccgctgttttttattcgctattatacagattccgagaacatcgagagaggtagttactctaatgagagaatcgtccggcatttctgcttgaaagccggttatcagtggacagatgaagaaaagattcatggttttgatggcgtaccggctgtcgagtacatagaaaacaatgaacgtatgggcatcttcgagagtgcgctgccgatgatcaatgcgtacaacaaagccatttcagaaaaagctaacgatgttgattattttgcggacgcatatctgaaagttcttggtacttatctggatgatgatgatatcaagcatatccgggatgaccgtatcatcaattttgatggcgatacagacaaggtcattgttgaattcctgcagaagccaaatggtgacaccacacaggagaatctgatcaaccgtctggaaaagcttatctttaatatcagcatggttgctaatatttctgatgagaattttggcacaagctccggcattgctttgaaatataagcttcagagcatgaacaatctggccatgacgaaagaacgaaagttcagaagcggtatgaacaaaagatacagtctgattttcggtaatccggtcagtcagacacaggggatcaaagcagatgactggatcggtattaaaatgcgctttaccagaaacttcccggcaaatgtaactgaggaagtagagaatgcgaagaacctgtccggtatcgtatcacaggagacgcagttgtcggtactgtctatcgttgacaatgtcagtgaagaagttgaaaagctggatgaggaacaggcaaaactgcagcaggatgctgtaacaaacatgatgttcgataagggagcaaacacccatgaagagcagtgaatactggaagaagcgtgaggcggatgccctgaagaactaccagaaggatgaagaggcctattacgaagagatacaggaaatctatgcagacatgatggaacgtatccagaaggaaatagacagcttttatatcaaatatgcagtcaaagaagacatcagcatggccgaagcaaaaaagagagtttcacggttggatatcaaagcttatgccagaaaggcaaaaaaatatgtcagaaaccgtgacttctccgatgaggccaacgaggagatgcgcctctacaatgcgaccatgaagattaaccgtctggaaatgttaaaggccaatattggtctggaactggtcagcggctatgatgagctgcagaaatattttgagcagacactgacggacagaacactggatgaatttaaaaggcaggcggggattcttggtgagaccatcactgataatgcggaaatggttcattccattgtggatgcctcttttcataacgcgacattctctgatcgtatctggatgcatcaggatgtattgaaaaatcagttatccagtctcgtgcaaacagggctgattcagggcagaaaccccagacagcttgctgtggagctcagaaagtactttaatgtcggcattggtaattctgaacgtctgatgcgcacagagcttgcaagagtccagacggcagctcagaagcggtcttttgaaaagaatggctttgaagaatatgagtttattgccaatggaacagcctgtgagaagtgcgccggattagatggccagcacttcaaggtcacaaagatgatgccgggaaccaatgcaccgccaatgcatccgaactgccgatgctcaaccgctgcttatcaggacagtgccgagtatgaggcttggttggactttctggataaaggtggaggcactgaggaatggcagaaagaaaatagtattgcaaaaggaagcagagatgctataatgaaatcgaaggatgctattttttacgaaggtattccaaagaactggaaaaaacttgacaatcttgatacatcgcttaagaatgttaatccttcatattctcaatggaatattgcatataggcggaattgtgcgaattgcgctgtcgcttacgaaatgagaaagcgtgggtatgacgttgttgcaaagcctgtaggcaaaaatcattatttacagcgttacccagaagcagcttggagtgaaccagatattatcgaaacatctggaacaggcctcaaagatatagaaaatactatgctgacttggcctgaaggagcacgtgctgaaattacaattatctggaaagatagtttggaaggccatgtgtttatcgcagaaaaggaaaagaaaaaaatcatatttcttgatgtacaatccggccatatatatgatgaaactatttttgaggatgccgaagagaataaaacaagattttggagaattgataatattgaaacttctgatagaggcattactgcatgtgaggcgggtgatttctaatgaaatttttaaaggcttgcgagtctgcaatgaaatattttaagcaacaatatggggatatcggattggcatctgttatggatattggcgagaattggctgtttagcggaaaaaatgagaaccagaatattttgtatggaaaagaaagtgtaattgtgaataagacaacaggtgaactacaaccgttctttttatcagaatatccaaattacaaagtcttgaaaaatgctgttaaaatagaggtgcctgaacaatataaatgaggggatgatactatggaaatttatgattcacacgaacgggcattgtgggaaaaggtaaagccgtatcttgatggatgccatttaagagctgatgccccaatggaaataatcgaagctgataaagaactgcatgaaatagcatgggatttggaccgtatgcagtaactgttttcgaaaaggagtatgatataacatggcaggaactacagtaaggtcgtatttagatgttgttatttcacgtccggatatgacaccggaagaaagagaagaagagcttcagcgtctaaaggaagaatgtgacaaattaacagattggccaccgatttattaatgctattaattcaggaataatctgattaattctggggaagagagaaaatggctcaaaatgattattttgtaattgtttacagggtattgaaatatctatatgattgcctgaaagctggtaatcagccagaaatcgcataccttacggcgtcaacatataacatcccggatagctactggacgtatattgtgattagcttaatcagtgaagggtatataaaaggcatagctatgacgccaacgaaaaacggtgtggtttttggagatttgcaggatgctgttattacaccgaaagggatagaatatttattcgagaattcactgcttgagaaagcaaagaagaccctgaaagatgcaaaagaaatgataccgttcatataaaacggtgaacaggagattgtaaaattgaataatttgaaaaatgttggatagtaccaccagtcaattatggccggtggtatttctatacccatttttaagaaagagaggttgaagaaacatgattatcacaggaatggcacattttcaaagtgtgtgcaaaaagaagatggtggaatggtataacaaaaatggttatgcagatacaccaaaaacaccgccgattgatttatccaatgtttttgtagtatggtcctgtaaaacgctgcagaactataaatgcctggtgtccactacggtaagtggtgatggcatctatgcagagtacacttacaacggtgataagcaggaactttatgaggatgtatacggtaaaataacaaatacatgtcatacagaagaatagggggcacagaaaaaatatggaagactatgtagaagtggatgaaaagaaatgtgatgaagtacataattgtatgtgtactaaagaagttggtgaaaaaacatattgtcgtggatgtggaaacattcagccaaaacaggaggtgtaaatcagtatgaagaaattatttatcagccagccgatgcgcggcaaatcagatgaagaaatcctggcagaacgtcagaaagcaatcgaggcagcagaaaaggtgattggcgaaccggtagaagtaattgattccttctttgagaaagcgccggtcaatgcgaagccgttatggttcttaggaaaatctttggaacttctggcagatgctgatgtggcttattttgctccgggttgggaagatgcgagaggatgcaagatcgaaaatatatgtgctattgagtacggtattccggtcattgaagattacacagcagagtagaaaggcggtgatccattcatctcccaccggcggggaacagtcggaatgaaaggatgtggtgaacgttgattgatataacggtaagaaaagaccgattgactgtgtctggccatgccggttacgctgccagcggtgaagatattatctgtgcagctgtgacggcattgtctggaacactggttaaatcaattgaagatttgactgatgacaaaattgaatatgatgttcagcccgggtgggttgatataaaatatagggatttatcagagaaagcaaaagctctggtagattccttttttattggcatctgtttagttgccgatgaatttccgggatatatccggatattgtaaaagacaggtccaggcacggaagacgttaaaagctgtggaagagtcaggcgtggcgacttaaaactacggtggaaagaacgagcaggcacggaactcataaaaagctgtggcagatgaggaaaatctataaagcgaggtaaatattttatgaaaaaaatgaaatggaatcagttccttttagcagggcttcagttattcgcagaagatggcggtgacaatggtggtgtcggagcagacggcgctggtgctgacggcggtgctggtaactcttccggagctggcggtgatggcaaaaaagacagtgagtcaaaaggcaaagaaggagacggaaaagaagcaaaatacaccgatgacgatttagaccgtatcctcaaccggaagtttgcggagtggcagaagaaaaaggacagagaagtagatgaagcaagacgtcttgccagcatgactgaggaagaaaagaccaaacagaaacaggctgatatggaaagacagctgaatgagctgctttctgagaaaaacagatctgagatgatggccacggccagaagtatcctttctgagcgcaacatccatgcagacgatgcactgatctctatgatcgtgtctgaggatgcagaaagcactaagaagtcaattgatacatttgccaatctgttccagaaagccgtcaataaagctgtcaaggatgccttaaagggcgaaccgccaaagactggcacaggctccggtaagggcggatacaccaaagaggatatcttaaaagtggccaaccgtgctgagaggcagagactgattgcagcgaacatggatttatttaagtaaaggagattgagaaaatggagaaaaaattcagattaagtggtcttcagctctttgcagctgatgaaaacacaacaaagacaacagatctcgaaccggcgatttctgtggatttcacgagccgtctgcagagcaatatcacagaactgcagaacctgcttggcattacagaccttgacccggtgaccagtggttccaacatcaaaatctataagatggagcaggtcaatacaccgcagcaggttggcgagggtgagacgatcggcctgacaaagattcagcagaagttggccagaacgattgaaatgacactgaagaagttcagaaaacagacaactgccgaagctattcagagaagcggcagaaatctggcgatcaacaagacagatgagaagcttgtttccagcatccagaagagcatcaagaaggatttttataccatccttttgacaggtacaggcacagcgtccggcacaggcctgcaggcaacactgtccgcagcatggggggctgtggcgaagttctatgaagatgaagatgcaacaccaatctattttgtctcttccgatgatgttgctgaatacctggcaaccgcacaggtgacaatgcagacagcttttggcatttcctatattcaggacttccttggtcttggtacggtcgttatcgcaccgtctctgacaaaaggtaagcttgttgctacagcgaaagagaatttaagaggtgcttatgttccggcacagtcatctgatctggcgcagtccttcggcctgacagccgattctacaggcctgatcggcatgacacatgctgtatcttctgacaatgcaactatcgatacgctgatgttcagcagtgttgtattttatccagagcttctggatggtgttatcgttgcaacgatcaatgcagctgaggcagcttctgcggatactaccggcaaaaaataaggagcagatgaatgatgacagcacttgaagatgtaaagcttcttcttgacatttcccctgatgaggaggacgcagtgctggacaggaagctgagtttgatcattgagaatgcccggaggcaggtgctgtcttatctgtcctccgagacgaaggaagtgccggaagagctttcttacatagtcacagagatggccgtggccagatttaaccggatcggcaatgaagggatgtcttcatatacccaggaaggcgagagtatcacctatggcagtgacatttcgccgtatctgacagctattcaatcctggaatgagaagcatggtacaaaagggcgggtgaggtttcgttgagatataatacaccgctcttttttgtatgtgccggtaagaaagaatatgatccggatgccggtgaatggaaagcagaggccgaaagccgtgtgaaacggtgggcaaacgttacgcacatgtctgcggaacggcagcaggccgtgtttggcgatatccggtcagaccgctatgtcatacggttgcggagaccgtttaaaggcgcttttgatgctgttgaaatcgacggtgtaaggtatctggcagatacagagcgttatccgtccgacagacagagtctggtggtgataaaaaatggctgatttaaaggtgaccggactggtcgagctggccagggctttaaagaaaaatgtgaagatggatgatgtgaagacgattgttcagaaaaacggtgctgacctgcagaggactatgcagcggaaagcagattttaaaaaaggctaccagaccggtacaacaaaacgaagtatccgcctaaatatcaaaggcggcggttttacagcggaagttgaaccaacaacggaatattcaccttatctggaatatggcacccgttacatgaagaagcagccttttgtgaaaccggcgctgacagaaatagaaccgaaattcaattcagacatgagaaagctggtgaagtgatgaaaacagcagaacaggccattcacgactgcctgtggaagtatctcgccgcaaagcttccggtatatgaaagcaggcccatgagggatgtcggctatccttttggcgatttcgaggatttttctaccgggtatctggccaccaaaggccgtgctttaccccagattacagtgaatctgaatatttgggataagcatgagaaaagaagcaatgtctcagctgtctgcagtcgattgatggactacgccaggggccttgaagaagcttatggttatgaagtgtcgcttcgaatcagcgacagcacatttacaattaatgaagaccggactgtcactccgtccatatggcgcgggatgataagcctggtctttgacattttatgagaaaggatgaaatgaatgggagcaattaaaggcaacaagattgtttatttataccgtctgctggcagatgccaagacgatggcggcgatggcactggcattccagacagagaacggccgtacaaagtccagagattctgataccgtcgtgacgaaagacggcccgatcagagttccgggcgatattgaaacagaaatttctgcaaccgcactgtttgcagatgaaaatgatgagatgatcgcaaagcttgaacaggccatcgatacaggggaacgtgtggagatctgggaagttaatcttgcaaagaagggcaccagcgatagtgcatcaaagtataagggaaaatatttccagggatatgtgacaagtcttgaattgtcttccaacgctgaagatcatgcagaggtttctattgattttgcaatcgaaggagaaggaaaagacggctatgtaacagtgactgccgaacaggaaaaggttgcatcctatgtatttaaggatacaacacaggaagcagaataggaggattgattaaatgatggaattacagatcaaaggacaggtttatcagtttaaattcggtttcggtttcatgagagaaatcgataagcagcagacagtaaaggcaccgaacggtacacagcagaatatcggtttccagacagctgtcggcggtattcttgacggtgatgcccaggcgcttgaagatgtgcttcttcttgcaaataaagggcaggagccacgtctgactgcggatgtactagaagaatacatcgaggatgaagagacagatgtagacgccctctttgatggggtgatcgattttttaaagaagagcaatgtatccaagaaaaagacgctgaatcttctgaaacaggcagaagcgatggggctcatcagccagtaagctttcaggaagtatatgaagatatagctatcagctgcttcagatatctggggatgaagagtcttgatgaagtagaccggatgaccatccgtgaataccggcttctgatgaaggcaaacaatctgaaaaatattgaccgtgattatcgggtccatcagctggcatggctgacaaatgctgcgagagcgactaaaagcgcaggcaagggaaaaagacgtcctgtctacgcaaagttctcgcagttttttgattacagaaatgctgtcagacaggcgcttggaaagaagaaaagaagtcggtttgacggtatcggccacttgctgaaaggaggtcgataatgggagattattcagtaaaagccgtcttatcggcggttgacagaggttttacctccacgctcaataacgctggccgcagcattgatacattatctggaaagatttcttccggtctcggtttcggcatcctgacgggcattgggcagaaggcttttgacactattgcaggcggggcgaaatcactggtctcatcggttgtcagtaccggtatggcatttgaatcctccatgtcaaatgtccaggctttaagtggtgccaccggtgcagactttgaagcactcagcgcaaaggcgcaggaaatgggcgcaaagacaaagttttccgcatcagaagccgctgatgccatgggctacatggccatggccggatggaatgccaaagacatgttaaacggtattgagggcgtcatgaatctagcggctgcttccggtgaagatttagcttctgtgtctgatattgtaacggatgccatgacagcttttggtctggcagctgatgggacgacaaaaggcgttgcaaatgctacatactttgcagatactttggctgcgactgcagcatccgccaataccaatgttggcctgatgggtgagacgttcaaatatgtcggcactatggccggttctcttggctacagtattgaggacgtgtctctggctattggtttaatggcgaaccgaggcttaaaaggttctatggccggtacatccctcaacagtgtcatgacccgactggcaaccaacaccagcggtgccagagaagctattgagaaattaggcgttaaattctacgattcaagtggtaatgcccgtgcccttggggatgtcatgacggaactgcgtgacgcaacaaaaggcatgaacaacgagcagaaaactgcgctggccaatactgtagccggtatggaagctcagaaaggtctgcttgctatcctgaatgctaccgatgacgaatacaacagtctggcagactcaatcaaaaattccacaggagcggcacaaaagcaggcagatgtaaaaatggacaacctgtatggtgatgtcactagactgaaatctgcctgggatggattgagtataaaaatatatacagccgtcaatgcgcttggaaaatcaaaagacggcctcggctctatgcgaagtgtggttcagtctgtaacggatatcgtcaacaaaacagcagatgccgttgagaatctgagtaatgtttatgcatcctccggtctgtccggagttgttgccgaggttaataagatgctgtccggcacaagtgacggcgttaagaatgttggtgcagccatcgccggtatcggcgctgttgttggcgcaaatgcgttctttagcagtggcacttggtttgcagtcagtaaaggcattgacgttgtaaacggtggttttggcgggcttgtttcgagcgttgcttcatctgcaaagggtttcaaaaagagtgcaagcagctttttaccatttgaagtgaatatcaggaagagcattgcttcgatgagaagcgatttcaggcaatcgtcaaaatggatttcatcattaggcgaagcaacttcacagtctttacaggcagtttcatcgcgattcgctacaacaggcggaaacgttaaatccgcattggatggaataagtggacatgtccgttcattcggcgataatttagcgcgtaacatgtgggataaggtcaataatataaccacacctttgaaacaaatgtcgcagaaagcttcaaccatcctgaagccgttttcgatggtaggctctgttgttggcaaagcactttcaacagttgccggtgcagctgtaaatcttggagcaaagacggcttccggactgacaaagattatggggcttgccttaaaagcattgatgcctgcggcactggttgcggcagcgctggccggaattggacttttgtattctcagttcggtacccagatcgaccagatgttatcaatggcccaggctaaaggtccacagatcatcacaaatctggtaaatggcatatcaagccggcttccggatttgattcagcaaggcggtaaacttgtatccgatctcttagatacgataaccgctaatttgccggctgttttaaatggcggtgttacattggttcagtcgcttgtgtccggtctaatcagcgcacttccaagtcttgccacatcagcaaccaatatgatatcaacgctgcttgtgggcattgcatccgcactgccatctctgatcgtatccggtatgcagctgcttcttgcactggcacagggtattgcaaataatctgccaacgctgattaattcagcagttacagctatatcgacatttgctcagggatttatccagaatctgccgacaattctgacgctggcagctcagattatcggtacactggcacaaggtcttatctcggccatccctcagctgatatcagccattccacaggttgtatcatccatgatcgatacgattatgtcaacggattggctggcagtaggcagtcagatcgtatccgctattggcgaaggtatcttcggcggtctggcaggcattggcggaaagatcggaaacttcttcggatccatcagtgactggttcgcgggtggtgaaaaaggtggcgagagtgtcacatcaggcagtgtgtcatctatcaatgccggtattccgcaggtatcttctgcagctacgtctatgggtacagccgcaaccagcagtgttgcatccgggatgcagagcagtacaggaaccgtcacatctgcagcacagagtgttgtgacatctgcgaccaatacattttcagcagcttccggaacggccatgacagcaggttcatccattggtcagagtttatcatccggtctgcagggaagtgttggcagtatcaataatgtcgcatccacagccatgaatggatttaatgcctcattgaacaccggcggtgcaacagctgtcagcaatgcaggaaagattgccagaaatatcgtcacagcatttaaaccagcgattacaggtgcacggacaagtggccagaccattggccagaatttcgctacagcgatatcatctaagtccggagctgtatccagtgcgtccggacgtcttgtaagtgccgttcgttcagcgttatctaatgtcagcacgtatcaatacggtgcttatattgggcaaggtctggcaaatggtatttggagtcagcttggcaatgtcagagcagccgccaacgcacttgttgcacaggcagaacgtgccatcagggcgaaggccatgatccatagcccgtctaaactgacgtatcagttaggcgaatacttcggtgaaggttttacgaatggtattaaaaatctgactaaagacgcatggaaagcagcgtctgatctggtttctataccggcggtcaatgtaccccaaatggcacttgccggatgggataccacactgaacgacgaatatttctacaatgattcagccgagtatgtgatttatgtgccggttgagattgacggaaaagaagtggccacagtgacagctccgtatacagaggcagaactgacgaagaggcaaaaatacagaaaccgcaaacagggtatcagataaggagggcagttatgtatgattttatagacgtcaatgagtatcagagcggcagtacactgccctctgaagccctgatgatcaatggagaatatatagaagatcaaattcaggggtatcggacgctctatgtaaaagggcgggaaatgttaaacaaagccgtaacgacacaaactgttgaaagccgtgacggtgcagacttccgttacagtcgttatccggaaaggacgattactgtcggatatgttcttgaggcagcagataacgctgccttcagagcagccttcaatcaattgaatgccatattaagcgttgatcagtcactgcttgtattcgccgatgaatcggataagtttttcagaggaacactgtcgggcatcgaagacgttacaccgggcagaaacactgtgcgaggtgagttttcttttatatgttctgatccttttaaatattcactgcaggaatatgaggcctcacccaatgaggacgatgggacaacttttgttattgattacaaaggtacatataagagttttccgacattggaagcaaccattgacgccggtgactgtggttacattgcttttttaaatgataatgcacatattatccagctcggggatccggaagaaactgaaggtgaaagctttccggcgtcccagacgttatttaatcaatcttttacatcatggaacgcatctgcagcaagcggctggggacagaacagtggggatgttgtgggctcttctgcctgggtacaggtaggttctatgaagacaatggccgccggggcaattaatatcctgacggccggtaactatggatccggttcgcagtggcacggaccgaccattacccgtgtacttccagcagatgcatccggagtggttggttctgctaatttccgtatgcagtggaagcagctgatgagcattggaacatccaaaacagcgggcaatgagagaggcatctttcagatgatgctgatcaacacggacagcaaccctcataaaatcgttgccggtgtatcgatcatgaaaagtaccggcggaacgaaagctacaaagcgtatctatgttggcaattctgtttatgccacaaacatcgacctgagttatcacaacggctcgtttgggtggacaatcgtcaataagaacggtcagaactttgttccggtccggacgtgctccatagaaaagaaaggcagcacgatcacttttaatattgcaggcaccaaacagagctacacggatccatcctgggagaatttaaaggttcatcaggtcacgattgctttcggccagtacggttcacagccaacattgtttacaaacggtctttattacgcaaaatttatagccgataattgcaccacctggcaggatatccccaataagttcagtgcaggcgatacagtcacggctgattgcagcagtgcggatatttgtctgaacgggctgccatcacctgagcttggtgctcttggcaatgaatacgaagacttttatttatcgccaggaccaaatcagatccattgcgtctggtccgactgggcaaaaaataaaccgacttttaaactgcgatacagggaggtatatctttgattctttattttgccgacagaaagatgaatatccttggctatgccacaactcaactaaaatctacataccttattgttgatgacaaaaagacagaagaagttgaatctggcatatccagtttcgaatgtgaagtgtcgtgggcatcaaaggaccggttaaagctggaaacaatgatggatgccggcaactatattcttcgttcaaatgaaaatgagaaagatttctttacaatcattgaaacaaacatcgatacatcaaaacagacgatttctgtctacgcggaagatgcgggcatggaccttttaaatgaggtggccatgccttttacatcagataaagcatatgatattgcacattacattggcttatatgcaattgatacaggcttcgagattggtattaatgagataccgaacctgacaagaaagctttcatgggatggagagacgacttgtacagaacgtatcgcatccattgccacacagtttgacaacgccgaaatttcctattcctttgaaacaaaaggccttctgatcacacataaatatatcaatatctttaaaaagcgtgggaaggataccggtgaacaactgcgtttaggatatgagattgcatccatagcaactaacaagagtgtcgctaatctggcaacatctctttatgtcaccggcggtatcccggagggcaaagaagagccaattactttaaagggctataaatatgatgacggtgacttttatgtgtggggttcacgtctgaacagtcgaaaagcactggctatctggtccagatatgtttgggatagagaaccgaataagctgaacggatacaccggtcacatcgtgcaggcttacagttatgacacaacaagtcagcaggagttgtgtgcccatgccatcacgaaactgaaaaagctctgtcagatggaagtgaattacgaagcagatatcatctatcttccggaaaacgtcaaaatcggagatagggtgaatgttgtcgataatgaaggaagattatatgcatccacccgtgttttaaggcttgaaacatctgtgacgggccgaaagagaacagcaacccttggggaatatctgatcaaagacagcggtatatctgaaaaagtgcgggatctggccagacaattcgctgaaagtactgcatctgtgtccagagcaaacataaaagcagaagctgctaaagctgccgcagacgctgcaaaagccaaggcagaagaagctgaagatgtctcgaatgctgcaaaggaaaccgctgaaggtgcaaaaagtacagcagatagtgcccttgcttctgcaaatgaagctcagaatacagccaatgctgcaagagatgctgccggtgaagtaacggaaaaagtgaccggtattgttaaggatgttaatgatgctaaaactgccgctgataatgcctggaaagcagcaagcactgccaaggaagatgcagcgactgcaaagacgtccgcagctaatgctgaaaagaatgctgctgatgcaaaaactgccgccgacgctgccggcacaaaatccgatgaagcggtatctacagctacagcagcgcagagtgatgctgccgaagctaagaccaatgcgacaaaagctagcgaaacagccgcagccgcaaaagcagatgccgcacaggcacagaaagagattgattctctcggcaaaaatctgacaacattgtctaacacaatgagagcagattatgcaaggaaaactgacctgactgaagcagaggcgtctctaaagacaaaaatcagtcaaaatgcagccaacattgaggcaactgctaagaaagtttctgtcattgacgaaactgctaataacgccgctgatctcgctgccacagctcagacaaaggcagaagctgcccagaccaaagcagatcaggcaacttcagaagcggcagccgcacagacaaaagccgatgaagcctcacaggcagcccagacagcacagagtaatgctgacactgccaaagccgcagcggaaaacgcacagtctgtagcggacaaagctaaaacggacttggcagaagcacagaagaatctggacactgtaaagggacgtgtagatgccacagaaggggatattgctaaagcacagaaagcagtgaccaccgcacaggccgctgccgagaaggctcagagtgatgccaatgcggctgctacaaaagccagtaatgcacaggatgttgcagatgcggcaaaggcaaatgcatcacttgcccagaccgcagctaatcaggcaagtgcaaaagctgaagcggcacagactattgccaatgaagcaaaagtgaatgcttcagatgcacagaagaaagccgcagatgcagtgaagacagccagtgatgccaagacggctgccaataatgctgcccagacagcgagtgatgcacaggacgttgctaatgctgcaaaagcgaacgcaacagccgcacagacagctgctgacgatgctaaaaagaaatctgaccaggcagccgcagatcttgtaagtgccaagaagaatcttgaggaagtgtctggaaaagttgactccactgctgaagaagttgaagcagcaaaagcagctgtagctactgctcaagtagccgcagacaaagctaaatcggacgcagccactgcacagtccacagccgatacggcaaaggccaatgcatcaaatgctcagaaagcagcggatacagctaagaccgcagccgacaatgcccagaaagctgctgatgatgcccagaaagctgctgataaagcgcaggacgatgtgaatgctctgactaaacgggttgtaaatgcagaaacatccattaagcagaattctgaggcaattgaactgagggcgactaagaaagaagtgactgaagcggcaaatgctactctaaagagtgccaagacctacgcagatgctcagatcaaagttactgctgacagtattaatcagaatgtaacaaaaaagtttgacaatctacaaattggtgggagaaattatgcagtcggaacatcaaatgaatggtctgaatattggatacctagcactggagtcaatatatgtcgtaatgtgactaaaattgtagtacccgatacttttaaaaaaggagatgtattcactacatctattgaaattgaatggtctgggtttaaatcgtctgaaggtacatttagattacggtcacaagggtcttcggatggtacgtgggataaacttaatccgtttgctgagaaactggctgacataagaactgaatctgggtcacagttatttaaagttacaaatacctgggatggaaaagcaacaaattatatagttggttttcgatgtgattattcatctggaacaggaaaaataagatggcgtcgtttaaaagctgaagctggcaacaaaggtactgactggtcgcctgcaccagaagaccttgctacagcggacaatgtcaacgataaactcaccgaagtccgcaaggaaatcaacagtaatattgagcagaccggagaagccatcaaatcatccgtctatgagaaagtctatctgaaggatgatgtagacaccttgctttcttctgttaatacagaagttgagcaggcgaaaacatcatggcaggtaactttcaatcagctcgttaagcagttgaacgactattcagatggcagtgatgcagcatttgatgaaattcgcaagtatatccgctttgaagatggcaatattcttttgggcaattcatccagtccgttgattcttcgtattcggaacgacaggatacagtttcttcaaaatggatatgaggttgcttatatatctgatcagcgaatgtacaatacaacctgtgagatcattaatcagcttcgtattgcagacagtgcgtggacggttgaaacaaatagcaacggtgataccattgtgtcactgatcggcttataaggaggtgcaacatcatggcttcaacagcaagtagtcatgtgccatgcggctataacggccactatcatttgtacatgacgattactcagaacaaacgtaatgcatcaacaaatcagtctaacgtaacggttaagatgtacgcacagtcggacagctcaagctatggagcttacaacctggatgcatccggtaatacagttaaaatgaccgtcaacggtaaacaagtggtcaataaatcgatggctatggatttccggaacaaagcgactgtacaacttgcctcctggactggggccatcagtcatggatcggacggttcgaagaaattagactgctccggttcgttctcaatatctggctcatcttacttgtctggcggctctatcagttgtagcatccagctcgaatctattcctagagctaccaaaccaacattgtcggcatcatcggtagcgttgggaagtgctgttacaattaatatttcaccggctgtttccgcatggacacataatatttattatcgcatcggtacaggtgattgggtacgatttgcaacaggcgtaaagagcaattacagctggacagttccgctaggtatcgcaagcagctatccgacagcaacaaaaggcaccatcacgattggtttgaacacatataacggcagtacacaaattggcggtactcagacggtcaatctgaatatcacgataccggcttcagtagcgccatctgtatctgccgtaactgtttcagaggctgccagcggtttatcgaattttggtttcgtccagacaaaatcgaagctgaaaatcgtggcatcagcatccggcgcctatagcagctcaatccggtcttatgtctataatattggttcacagtcctacagtgggcttgaaaatacctatacgatgggcgaggtggttcgagattccggcacagttgtcgtgacagttacggttactgacagccgaggcagaacggctagcaaaacagttagtataacagttctggcctacagtccgcctcagatcacgcatttcgaatgcagccgatgcggagatgcgaatggcagtgcgaatgcgaatggccaatatctgaaggtcacgtttggttattctgtttcaccgctgaacaacaagaataaagcgagttatttgctgaaatattctgtttacgatgacggtaaatggggcggtctgatttctggaacacaatacacctattctggaacatacatatctgcaacagcgatattgaacaccgccagcacttatcagattggattagtcgttacggatagcttcggaacagcttcattctacaaagaaatcggtacagccgtcagattgctgtcgtatatcgtcaaacgatttgcactggccattggtaagattccggagatagacaatatgctggatgtggctttggaaacaatcttcagaaagaaagtcactatgaattcggatttacaggtaaatggcaattctgggttttctgagggtgcttcattctatggagatgctgcatgcaatggtacattctatgcgaacggtaatctgaatgctaatagggatattggtgttggtggaaatatgtggttcaatcagaacaatggcatattgtttgttactcgaaatgatggtgtgcaactagaagctattaatacatgcgatggggaaaacaatttatctttcgggtggactaattataatgaacagcgcggagacacttatgtcggcggaaaagatgtctactttagagtttcaggaggagcatctaaagttggatatcgcccttattaccgccgaggtgattcaatagatgttcgaatgggtacagcgggatatgttacatcaggtacaaaagaattttattttgctataccacttggcaaacctgttgtcggaaatccaactgtgtcagtatcgtcgatcaacggacttatgatgcgacaaaatagcaaatatattataaaagctgattgggttcaaccggataggtattcagcatatgttcgtgataacaatgccataggggtcatcgctttttggaacagtgcaacaaatgccgcaaataacagcccagttggtattgatgctaatataagaatcacattttcataaaggagactcaaatggcactttataaagaaattgtacaggacgatggtgtagtgacttgctatcatcgtatcctgtatcaccagacaacccctaatcgacagacatctatagctgtactgtcatatgtcaatgaaaaagccagagaggccgaaaaagacaatacaatggctcagccatatatgaaagctgtcacgtatgagacggattatgacagtgccatgacagacaggaaagcctatgcttatctgaagacactacatatctttgagggagcaaaagatattgtagatgaggcggacacagatatttccggtgacgactttctggccatggtagaggaggtgatgtaatgacacttgaagaagcaaaagccattattgatgcgcttgtgacgctcagaaactctgcgacagatgagcaggcactgaaagcatcagcattgtatccgaagtggaaagtaggtacagcttatcagaaagacgagagagtattgtatgacgacatcctatacaaagtcctaacagaccacacgtcccaggatgactggacaccggatgaagcgccgtctttattcgccaaagttttaatcccggataaaaatgttattccggaatgggagcagccggagagtaccaatccttacggcaagggtgataaagtgacacacaacggcaaaacgtggcggagtacgattgatggcaatgtatgggaacctggcgtctacggttgggaagaaatcacagagtaaagaaagagaggataagagaatatgagaattgaatttttacagatttttgctgaggcaatggcgagcaatgttatttttgaagcgctgatgattgcggtggtattagataccattctgggagttcttagagctattaagttccgaaagtttaatagctctgccggtatcgatggtgctatccggaaagtggccatgctggtgagtgctgccgccttgatgggtgcagatctgctggtacatgtcaatctggcagcaatgattccagatacatatttgcaggccgtcggactcacaaaagtcggcctgtgtgaattgttctgcttgttatttgttatctatgaatgcatttcaattctgaaaaatatgcttttgtgtggacttccagtgccagcaaaattaaggagctggctggaagagtttctggaaaatatgacagcagaacttccggaagagacaaataaagaaacagttgaagaaactaaaaagcgagttgattaaactggattgattaaagtgagttgaataaattacaggcaccttcgggtgcctttttatgaaaggagaatttctatgagtgtaacatttgaccagacaaaagagggttatgtaaacggcacatcgatgccgctggcgggctgtggtccgtgttctgttgcgtctattgcatgcaatattgcctatacgacaccgaaacaggtagcggcatggcttgccaatagaggggccttcggtacttccggaacaacccgtgcaggtatcacggttgctctggatcactatggtttcaagagtacatactatacaccagaaagtggcggcggtacatcctggaagaaagcgatggatcagatgaagagtcttaagggtgactggtgggctatcttcttggtagtgggcactaagaatggcggtaaggataacctctggacatctggcggtcattatcttgctatcacggacctgaagaatggcaaattgtatgtcagagattccggatccaagaaaagaactgggtactatgatccggagcttctcaggtatgacacaaacgttatctgggtgattcagaaaaagagcaacgtggccacttattcaggcgcatttccaacattgccagcgaagggatatcttggtcttaaagatacgggaacccaggtgaaacatttgcagatgtttctgaagtggtacggcgtatacaaagacagcatcgatggcagctttggagcgaatactgaaaaagccgtggttgcattccaggcagaagaaaagctgaaacaggacgagagattcggaccggcatgcctgactagagctaagacggtgaagaaataattcttgcgtttttttatcagctgtgggataatgaagcgaaagctttgactgtaaaaaaatacagttttttcggccgtatgacacgaaatatgacacggtttttctgaaacggtgattcttcctattaatataggtagaaaaaacgttttcaattcccgtcatcagctggaaagcggtcttcataggaaggtcgctttttttagtaataagaaattccgttggaattccctattacataaaaaggcactgcgtgccagaaagcgcacactttattctttgacaaatccaaaatcctgccctatagtataaaaaacgaaaccatatatgtaaataacagaaaggcacctattatgacattgacacaactccattatgttattacaattgcagagacgaaatcttttaataaagcggctgagaagctttatgtttcccagccctccttgaccagcgctataaaagagctggaaaaggaactgggaatttctattttttaccgcaacggccggggagcagtgctgaccaatgatggaacggaatttcttctatatgccaaacagatttacggacaatatgagaatgttcttgagaaatacggcaaaggcggatcttataagaagaagtttggtgtatccacccagcattattcttttgcagtcaaggcctttgtggatatggcaagagaatttgatatgtccaaatacgaatttgccatccgcgaaaccagaaccggtgaagtcatcagcgatgtcaataccatgaagagtgaaatcggtgttttatatctatgtgatttcaatcgtaaaactatgacgaagcttttgaaaaatgccaatctggaatttcatcatctgattgactgtcaggcttatgtatatctatggaaaaaccatccgcttgcaaaagaagcatccatccgttttgaacaattagaaaagtatccttgtctatcttttgaacagggcgacaacagctctttctacctggcagaggaaattctatctaccaatgaatatccacaagtcattaaggccaatgacagagcgaccatgctgaatctcatgattggcttaaatggctataccctttgctccggcatcatctgtgaagaactcaacggcagcgactgtattgccgtaccattccatgcagacgaacaaaatcctaacagcctgatggaaattggctatgtaacccgaaagaataccatactcagccagatgggagagcgctatatctactatatcaaacaatatctgaaaatcgaatagcagccgcgtctgcatcctcggcctgaatgtcctattcatagctgcccggttataaagttagttgcatgagctataagctgaatttataaccgggtattttttttgcatattggacaattaattcctagcatgttagtataaatacagaaattaacaaaggagctgcaagacatgaaacaatttgcaatcatgctgagcaggaaccgaatgtggggctaagttcagcaaaagacattatcgagttaaaaaataaaaataactaagaaaacaaaaaacatacaagtagaaattaaaaacgaataaaataaaatttttgattaatcaggaggacattacaatggcagatattaaagattcaaagaactggggattcgagacaaagcaggtacatatcggacaggaacaggcagaccctgtaacagatgcaagagctgttccaatttatgcatccacatcatacgtattccataactcacagcatgcggctgatcgttttggccttcgcgatgccggcaatatttacggcagactgacaaacccaacagaagatgtatttgaacagcgtatcgcagcgcttgaaggcggtgttgcagcattagctgttgcatccggcgcagcagcgattgattataccattcaggcacttgcaaaaaatggtgaacatatcgtcgcatctaaaacaatttatggcggaacctacaaccttctggctcatacacttcctttgactaacaacatcacgacaacatttgttgatccggaggttgaaggttcatttgaagcagcaatccaggaaaatacaaaagcaatttatatagagacacttggtaatccgaattcaaatcttgtagatattgaggaactgtctaaaattgctcataaacatcatattccactggttgttgattcaacatttgcaacaccttatctgattcgtccgatcgaatacggtgcagatatcgttgttcattcagcaacaaaatttatcggcggccatggtacagctatcggcggtgtcatcgttgacagcggcaactttgactggaaagcatcgggcaaatatccatggatttccgatccgaacccaagctaccacggtgttgcatttacagatgcagcaggccctgcagcatttgttacttatatccgtgcagtcatcctgagagatacaggcgcaacactttcaccgtttcatgcattcattttccttcagggacttgaaacattatcattgagagtagaacgccatgtcagcaacgcattaaagattgttgattatctttcaaagcatccgcaggtagaagctgttcatcatccatcactgccaacagaacctagccatgaattatataagaaatatcttccaaatggcggcggttccatcttcacattcgaaattaaaggtgatgccaagacagcacaggatttcattgaccacctgtccatcttctcattgcttgcaaacgttgctgatgtaaaatccttggttattcatcctgcaacaacaacacacagccagtgcacagaagaagaactgcttgaccagggtatcaaaccaaacacaatccgtctttctatcggtattgaaaaagtcgaagatcttatcgctgcattagacgctgcttttgaagctataaaatagtcgaattaaacgcattaacagaataaaataaaaacaaaaaactataaaagctgttgctgaagcctttgtctgaaaatgatttagtttaggatagtatatattttcggataaaagccaaagaacagctttttttgctttacaatccttaaaaatatggtatgatttagtagtattctctcgttcggagtacaatatctaacagagatacttgaaattcatatgtgcaggcaggtggagtggcctgctgcattcaggaggaccaaaaatggaaaaagcaactgacaatttaaatgaaaaaccagcagtaacgaagaattttattgaactggcgattgataaggatcttgcagaaggcaaatataccgagatctgcacaagattcccaccggaaccgaatggttatctgcatatcggccatgccaaatccatccttttgaactatggactggctaagaagtataacggtaagttccatcttcgttttgatgatacgaacccgacaaaagagaagacagaattcgtacagtctatcattgccgatgtagaatggcttggcgctgcttatgacggagaagtgcgttttgcatccaactattttgatcagatgtatgaggcagccgtaaagctgatcaagaaaggcaaggcttatgtctgtgacctgaccgctgatcagattcgtgaatatcgcggcacattaaaggaaccaggcaagaacagcccttatcgtgacagaagtattgaagagaatctccagttgtttgaagatatgaaaaacggcaagtatccggatggatccaaggtattaagagcgaagatcgatatgtcttcaccgaatatcaacatgcgtgacccgatcctttaccgagttgccagaatgactcaccacaatacgggggataaatggtgtatttatccgatgtatgactttgcacatccgattgaagatgccattgaaggtatttcccattctatctgtacactggaatttgaagatcatcgtccgctttacgactgggttgtccgcgaactggaatatccgatgccgccaagacagattgaatttgcaaagttatatctgactaatgtcgtaaccggcaagcgttatatcaagaagctggttgatcagggtattgttgatggttgggatgatcctcgtcttgtaaccatcgcagcactgagaagaagaggttatacccctgaatccatcaagatgtttatggagatggtgggtgtatccaagagcaacagctctgttgactatgcaatgcttgactactgtatccgtgaagatcttaagatgaaacgccctcgtatgatggctgttcttcatccgctgaagcttgtgatcgacaactatccggaaggtcagattgaatacctggatgtaccgaataatcaggagaacgaagcgttgggtacaagaaaagtaccgttcggccgagaactttacatcgaacaggatgatttcatggaaataccgcctaagaagtatttccgtctctatcctggcaacgaagttcgtctgatgagtgcttattttgtcacatgcacagatgttgtgaaggatgaagcaggcaatgtggttgaagtacactgtacttatgatccagcgacaaagagcggttcaggctttacaggacgcaaagtcaaaggaacaatccactgggtagctaaagaaacagctgttaaggcagaagtacgtctctatgagaatcttgttgatgagtccaaaggcagtgtttacaatgaagacggcagtgtgaatatcaatccgaattcactgactgttctgaaagactgttgtctggagccgaactttgaaagtgcagtgggcggagacagctatcagtttgtccgcaacggtttcttctgtatcgacagtaaggattccaaaccggatgcccttgttttcaaccgcatcgtatctttgaagagttcatttaaattgaataaataaaatacgtggagtgtgctccaagaatactgaaaatggatgttgaacaagcaattcaacatccattttatgttatttacgcgagcaacgagccaaagtccgtgcttgcacgagaccttggcgttgctaagcgccagtggcgcttgtttagcaacgaccgaaacggagtgtagaggccgcgataacttgagaaactcgcggagcgtgtttctcatagttggcagagcatactcctttgggctgaatgcgagttcttccaaatacaaaagttgttcttgggtttttactcaatttaacaatttaaaaatgagagatatagtgagtatttaagagaaataatgaggtaatagtataatatcagcacataatcacctctgaataaagttgcacattttagaaaaattaaataatatataaccatcgattagcactcaaatcaggtgagtgctagcaaatgataatgatgattatatatccattagaatatcaaggaggcatattaatatgaagttagttccattaggtgacagagttgtattaaaacagtgcgaagcagaagaaaagactaaatccggtattattttagctggtcaggctaaagagaagccgcaggaagcagaagttattgctgtaggacctggcggtgttgtcgatggcaaggaagttacaatgcaggtagctgtaggacagaaggttatttattctaagtatgccggtacagaagtgaagctggatggcgaagaatatatcatcgtaagacagaatgatatccttgcagttgtagaataatcatttattcagacagacttattcctatatttttgaattatagatttggaggtaattacaatggctaaagagattaaatatggcgcagaggctagaaaagccctggaagcaggcgtgaatcagcttgcagatacagttagagtgacacttggaccaaaaggaagaaacgttgtccttgacaaatctttcggtgctcctttaattacaaatgatggtgttacaattgccaaagatatcgaacttgaagatccttttgagaacatgggtgctcagattgtcaaagaagttgctacaaagacaaacgatgtagcaggtgatggtacaacaacagcaactgttcttgcacaggctatgatcaatgaaggtatgaagaatctggctgcaggtgctaacccaatcatcctgagaaaaggtatgcagaaagcaacagaagttgctgtagacgctatcaaagagatgagctctacattaacaggcaaggctcagattgcaagagttgctgctatttccgccggcgatgacagtgtcggtgaaatggttgcagatgctatggaaaaggttacaaacaacggtgttattacaattgaagaatccaagacaatgcatacagaacttgatctggtagaaggtatgcagtttgacagaggtttcctgtccgcttatatgtgcacagatatggacaagatggttgctgaacttgacaacccatacatccttatcacagataagaagatctccaacattcaggaaattctgcctgtacttgaacagattgttcagaacggtgcgaagttactcatcattgctgaagatgtagaaggtgaagcattgacaacacttgtactgaacagcttaagaggtacattcaaagttgttgctgttaaggctcctggctatggtgacagaagaaaagaaatgcttcaggatatcgctatcctgacaggcggtacagttatctcttctgaaatcggctatgaattaaaagatacaacatttgatatgcttggtcgtgctaaatccgttaaggttacaaaagagaacacgatcatcgttgatggtgcaggtgctccggaagcaattaaagctagagttgaccagatttctgctcaggaaaaagaaacaacttctgattttgatagagagaaattacaggaaagacttgctaaactgtctggcggcgtaggtgttgttcgtgtaggtgctgctacagaaacagaaatgaaagaaaagaaactccgtatggaagatgctttagctgctacaaaggctgctgttgaagaaggtatcatctgtggtggtggttctgcttatatccatgcatccaagaaagttgctgaatatgctgcaacacttgaaggtgatgagaagacaggtgcaggcgttgttctgaaagcacttgaagcacctctgttccatatttctgccaacgcaggtcttgaaggtgctgttatcatcaacaaagttcgtgaaagtgaagttggtgttggtttcgatgcactgaacgaaagatatgtcaacatggtagaagcaggtattattgaccctgcaaaggttacaagaagtgctctgcagaacgcaacaagtgttgcttctacacttctgacaactgaatctgtagttgctgaaattaagaaagacgtgccagctccaatgccacagggcggcggaatgggtatgatgtaatcacataatactttcacaaaagatgagggttgtcgcagactgcggcagccctttacttgttcccgcagtctgtatcgtgtataatagatacgcaggcattctgcacctgagcccacaagccgggctttgattatagaagaaatacaaaggagaacaagaatgtataatggtgcaaatggagatacgttttgtgaggtgcttgtcagccgcagaagaggaacacccgaaacagtgaaagcagcactggctattatagttggattacttttctcagcggttattattctgctggtaccgatgttttttattttgcttattccggtatgggcattggtgatatttgttgtcagaatgcagaagctggaatatgaatacatctttacatccggagatctggatattgatgtactgatcggcaattataaacgaaagacccgaatgagtctttccatggagaatataacactggttgccccagagaattcatatgaattggatggatacaggaggaacccaaatagtcaccgttatgatttcagtgccaataatgtcatgcagacaaattatatcattatcggcaattggaataatcagcagatttacgttaaattcacacccaatgagcagattttagatgcaatgttcagaacatctccgaataaagtcagacgcaggtagacaaatgtcagtccatggcggaaaaataaatagtattaataatactaataaaataatggttgacattttttttacagtttgttaaactttttaaaaattaaagcaagtcactatcaatgacaacttatgatctgaacagaatataggttgtcaaacttatataacgaaagagaggaatatgcaatgagcaaaattatcggcgaaggtattacatttgacgacgttttacttgtaccagcctattctgaagtcattcctaaccaggtagatatttctacatggctgacgaatacaatcagattaaatgtacctctgatgagtgcaggcatggacactgttacagaacaccgcatggccatcgcaatggcaagacagggtggtattggtattattcacaagaatatgtctattgaagcccaggcggaggaagtagataaggtaaagcgttctgagaatggcgttatcacagacccattttatttatcccctgaacatacattggcagatgcagatcgtctgatggcaaagttcagaatttcgggtgtgccgattacagagggcaagaagcttgttggtattctgaccaatcgtgatcttaaattcgaaacagactacagcaaaaagatcaaagagtgtatgacaagcgaaggcttagttacagccaaggaaggcgtgacacttgaggaagccaagaagatcctcggtcaggcccgcaaagagaaacttccgattgttgatgataacttcaacctcaagggtctgatcacaatcaaggatattgagaagcagatcaagtatccgctgtctgcaaaggatgctcagggacgtctgctctgcggtgcaggtgttggtgttacagcagatattcttgaccgtgtagatgcacttgttaaggcacatgttgatgttatcgttatcgatacggcacacggccactcagccaatgttcttcgtaccgttcatatggtcaaggatgcttatccggatctccaggttatcgcaggcaatgttgccacagcagaagcaacagaagcactgatcgaagctggtgtcgactgtgtcaaggttggtatcggacctggttctatctgtacaacacgtgttgttgccggtatcggtgttcctcagatctcagctgttatggattgttatgaagcagccaagaaacacaatattccgattatcgctgatggcggtatcaagtattccggtgatgtaacaaaagcaatcgcagctggtgccaatgtctgcatgatgggcagcatgttcgcaggttgtgatgaaagcccgggcagcttcgaattgtatcagggaagaaaatacaaagtttaccgaggcatgggttctatcgctgctatggaaaacggaagcaaggacagatacttccagtcagatgccaagaaactggttcctgaaggtgttgaaggccgtgttgcttacaaaggcttcgttgaagacactgtattccagctccttggcggtctccgtgcaggtatgggttactgcggtgcaagaacaattgaagaactgaaagaaaacggacgtttcgtgaagatttctgcggcagctttgaaagaaagccatccgcatgatattcacattacaaaagaggcaccaaactacagtgtcgatgcttaatctgtaactgttcagagccaagcaaaatttcaaacaataagtcggctgctgcaggattgaagaagaattttcaattttgcagcagctttttgcatatttttatccaacagccggataataaaaggatgacccttgtttacgattaatagcaaaatgtgttataatagatggcacgaatgcgaaaatgatcaggaggcataaaatgacagacaaatttactcatattccggcggcctatgaaatcgtcagtctggaatatatagatgagatcaaatcccaggcagcactgctcagacacaggaaaaccggtgcaagaatcgctgttctggctaatgatgatgaaaataaaaccttcaatatcggtttcagaactcctccaaaggacagtaccggcgttgcccatattatggagcactcggttttgtgcggttcagagaagtttcctgccaaggacccttttgtagaattagcgaagggctctcttaatacatttttgaatgcgatgacctatccggacaagacggtttatcctattgccagctgcaatgatgcagattttcagaatttgatgcatgtctatctggatgccgtttttcatccgaatatttatattcatgatgagatcttcagacaggaaggctggcattatgagttaacagacaaggacgcaccccttatttacaatggtgttgtctataatgaaatgaagggcgctttttcagcacccgaacagattttatatagaaagatcaccgatacactgttcccagacaccatctatagtgtcgagtccggcggtgatccggatgtcatcccacaactgacctatgcgcagtttctggatttccacaggaagtattatcatccatccaacagctacatttacctgtatggcaatatggacgtggcagagaaactggcttttattgatgaagcatacctgtgccaatttgataatacccgggtagattccgctattgcaaagcaggctccatttgcccacacttctgtcacccgtggtgaatacccgatcggcaatgatgacagagaagacaatgccgcttatatggcatacagctgggtcgttggtgacagccttgatgccaagctttgccttgggtttcagattcttgaatatgcactgatggaagctcccggagcacctttgaaacaggcgcttttagacaaaggctttggggaagatatctatggtatgttcgagacaagtctgatacagccatatttgtccattatcatcaagaatattaatgaagaagacagagatgaaattgttcaggtgatccaaactgaattagagaagctggcagatggcgggctgaaccacaagacacttgaaggcgccttgaattattatgaattcaagtcaagagaaggtgatttcggccgctggccaaaggggctgatgtacggattacagttaatggacagctggctctatgatgacaataagccttttgttcatctgaaattccaggcagtttatgatgaattaagagagggcctttccaagggatattttgaggacttgatccgacactatatgattgataatacccactgttctgtttatctgctttgcccatctaaggggctcgcagcaagaaaagagcaggcattggctgatcagctggcagaatacaaagcttccctttcagaggaagaactggagcagctcattgcagccaccgaagaattgaagcaatatcagagtgaaccatcgccaaaagagatccttgaaatgatcccgctgctgacaattgatgatatccgcaaagaggctgaacctatctacaataaggtgttgtcggaagaaggtattgctattctgcagcacgaaattgaaactaatcgaattgcttatgttgatctgctgtttgatatttcccatatagatgcggaagaagttccttatctcggcatattgacagaagttcttggcaatatgaacacagatcactatacctatcaggaactgacagatgaggtgaatttatataccggcggtcttcggacagcagtgaacatttacggtcttcagggcagtgatacttataagccacgatttgaaatgtccggcaaagtcctgtacagcaaagtgccaaagatgtttgaattatttgaagatattttacttcatacccattttgatgatgagaagcgtctgaaagagattctaaaccagctgaaatcccgtctggaaatgggctttatgtcaaatggtcattcaacggctgtaaacagagccatgtcttatttcaaccagggcagctggtacaaagaactcgtagaaggcattgctttctatcagttcttgtgtgcgatactgaaagattatgacaccagaaaaacagaaatcattcataaattgcagacaatcggtcagaagattttcagaaaagcataccttatggcggatatgaccgttgatcatgaaggcatgcagatatgtacaaagccactcgtatcctttgccggcaagttatacactgcgccgatgagcgctgtcgactgtgcagtcaaaaccatcggcacatgcccgagacacaatgaagcttttatcacatccggtatggtacagtataatgcctgcgcaggcaattttgggggatcaggtatggcttacagcggcagtatgaatgtactgaagaatgtgttgggcaatgaatacctctggaataatgtcagagtcaaaggcggtgcatacggctgtatgtgcggttttgcgccaagtggcaatggttatttcacttcttacagagatccgaatcttgcaaagacttatgatatttatgcgaatacagccgactatgtccggtctctggcattagatgacagagaattgacgaagtatatcatcggtgccgttggtgccatcgacctgccgatgacagcttctatgaagggaaaccgttcactggcagcgtttctcggggaacgcagttttgaacagatacagaagaacagagatgagcttcttgcaacaactgttgacgatttgagaggcctttcaaaggctgttgcgtcagtcattgaagccggtcatatctgcgttgtaggcagtgaaagcaagatcacagaagaaaaggaccgttttgaatacgtggcacagcttactcaatagcataccaagtgattcaaaagctttaagcagttcaatttaggaaacataagacatataaaaatatcttgagaatcaaacaggggagaatttatgaatcaacaatacaaatccggatttgcaacactgatcggtcgtccgaacgtgggcaaatccacattaatgaaccatttgatcggacagaaaatagccatcacatccaataaaccgcagacaacgagaaaccgcattcagacggtttacacaagcgaagaaggccagattgtttttgtggatacaccgggtatccacaaagccaagaacaaactgggtgagtacatggtaacagttgcagaacgcactttaagtgaagtggatgtcattctctggcttgttgaaccaacgacttttatcggtgccggtgaacagcatattgcagaacagttaagaaaaacgaaaacaccgattattcttgttatcaataagattgataccgtaaagagagaagaaatcctcaaaagcatcgacgcatacaaagatatctgtgattttgcagaaatcgttccatgttctgcacttaaaggggacaatacagaagatttaatcaaagtcatcatgaaatatctgccgtatggtccgcagttctacgatgaagataccgttacggatcagccggagagacagattgttgcagagttgatccgcgaaaaggccttacgatccctgaatgaagaagtacctcacggtatcgctgtttctattgatcagatgaaagcacgcaacagcaggctcattgatattgatgccaccattatctgtgaacgcgattctcacaaaggcattattatcggcaaacagggcaccatgcttaagaaaatcggttctcaggccagaccggaaatcgaggatatgcttggaaagaaagtcaacttaaaactctgggtcaaagttaagaaagactggagagacagcgattttctcatcaagaactttggttacgataagaaagaatactaggaaagatgtgtccaaatggctgaactggtaaaagtcacaggtatggtgatctcaacgatggctgtgggagaatatgataaaagggttgtcattctgacaaaggaacggggcaagattcacgggtttgcccgaggcgccaaaaggcccggcaatagtctgatggcagctgcacagccttttgtattcggagaatttatgttactggaaggccgcagtgcttatacaatctccagtgttaaagtaatgaattatttcgaggaatttcgaaaagacatggatgccacctgttatggctgctattttcttgaatttgctgattattatggccgtgaaaacgcagatgatctggaaatgctaaagcttctctatcagactgtacgggcgctgtgcaagaaaaccattgcctatcctttaatccggtgtatctatgaattgaaaattatggctgttaacggagaatgtccgcaatgctttgagtgtgcctgctgtcatacaacagaaaatctatctgttttcagtgcccgttatcgcggactgctctgcgagaaatgcgccggacatgagaaaatgacaacgatttctataagcccggcagccatttataccatgcagtatattatcagtacacctattgaaacaatatatacatttacggtctccgatgatgtccttaataatctcaagtcaatcatcgaacgttatcgaaaccaatatattgacagacgttttaagtctcttgaaatattgacgatgatggaagatgtgtaaagtaaaagaattctcaaaaagggattgaaaaactggtattttaaggatacaatgaatgagacatacacagacaggaggtcatataatgaagcattgcatattaccggctgtattgctgtgcatgacgcttctggccggatgtaccggaaggaaagttgatttgtccaatgtgacagagtcgacgatcggcgtaaatggagacggttctgtcgaggaagttgtaatcgaatcctttgacaaggagtattattccttgtcagacttgacagcgtatgtcaacaagcaggtggatgcattcaatcaggccaatcctcaggagcagccgaaggataagaaatcggatgatgaagaaattacagctgtttccgttcattatgttgagacggacccggatgcaaaaactgcggcaatggcacttggatatttgaatatggatatctatgacgctttcaatgagacggattttgaatttctttcaatggaagaagctgcttcagatgaacgtattgcagatatagatggtctggttgaggtgaaaagcggagaggagactacttttaaagatctgtccgagcataagcatcttcatctcatttatacagatagttctgtgcgtattcagaccagcggtaagattatgtactacagtaaaaatgtatctctggtggatgatcatacagttcagacttcggatgatccgtcagtgattctcttcaagtgatctttcacttgatagcataaataaaattgcgaggtaaagaacatggaaaaaacaatggaaaaaatcgtagcacttgctaaagcccgcggatttgtttatccgggctcagaaatttacggcggacttgccaatacatgggactacggtaaccttggcgttgaattaaaaaacaatgtaaaaaaagcctggtggaagaaattcatccaggagaatccatacaatgtgggcgttgactgtgccattttgatgaaccctcagacatgggttgcatccggccatctgggcggtttctcagatccgctgatggattgtaaagaatgtcatgaaagattcagagcagacaaactgatcgaagatttctgtcaggataacggtattgaactggaaggttccgttgatggctggtctaacgaacagatggtcaacttcatcgatgagaagaatatctgctgtccaacctgcggcaagcataacttcacagatatccgtcagttcaacctgatgttcaagacattccagggtgtaacagaagatgcgaagaataccgtttatttgagacctgaaactgcacagggtatcttcgttaatttcaagaatgtccagagaacatcccgtaagaagattccatttggtatcggacagatcggtaagtctttcagaaatgagatcacaccaggcaattttactttccgaacaagagaatttgaacagatggaactggaattcttctgtgaaccggatacagaccttgaatggttcgcatactggaaagaattctgtattaactggcttcagacgctgggtatcaaaccggatgagatgagagtcagagaccacgaagctgaagagctttccttctattccaaagcaacttccgatattgaattcctcttcccgttcggatggggcgagttatggggcattgcagacagaaccaactatgacctttcacgtcatatggaagtttccggcgaagatctgacatactttgatgaaggtaagaaagagaaatacattccattcgtcattgaaccttctctgggtgctgaccgtgtggtacttgcattcctctgcggcgcatacgatgaggagaatatcggcacagaagagaaaccggatatgcgtacagttcttcatttccatccggcactggctcctgtcaagattggtgtactcccattatccaagaaactgggtgagaaagcagaagctgtctatgcagaactttccaagaactggaactgcgaatatgacgacagaggcaatatcggtaagcgatacagaagacaggatgaaatcggcacaccattctgtgttacttatgatttcgattccgaagaagatggctgcgtaactgttcgagacagagatactatggaacaggaacgtgtgaagattgaagatctgacagcttacttcatggagaaattggcttactaagatgatttaaaaatacgactgaaaaggcatgtgaaaaatgattttttacatgccttttatgttgtctatagtcgaagaattgaataggctattgataattgtgcagtttattggatgatgtatgcatatgccgaatgataactggcaaatatttgttaaatattcactatatagcatttgctttttaagaaaaaagtgctaaaatatagatatcggaacttgtagtatatatcattttgtagtgtattttgcacatgaattcagatggaaaatatatcagcgcagcagacttgaattctgcaccgggatttcattgtgattctaggtacacaagcatttaagggggatttataatgcgcaagtgggtttacatgtttacagaaggtaatgcaagtatgcgagaactgttaggtggcaagggtgccaacctggcggagatgacgaatctcggtttacctgttccgcaaggttttacaattacaacagaagcttgtacacagtactatgaggatggacgatatatcaatcaggagattcttgaccagattatggaagctattgcaaaaatggaagagattaccggcaagaaattcggtgataaagagaatccgctccttgtatccgttcgttccggtgccagagcttccatgcccggcatgatggacacaatcctgaatctcggattgaacgaggaagtcgttcatgtcctggcgaagaagtccggcaatccaagatgggcctgggattgctacagacgatttatccagatgtattccgatgtcgttatggaagtgggcaagaagtattttgaagaactcattgacaagatgaaggctgaaaagggtatcaagctggatatcgacctgacagcagatgatctgcacgcgctggcagaccagttcaaagccgaatataaagagaaagtcggcaaagacttcccggatgatccgacagatcagctgatttatgccatcaaagctgtttttcgttcctgggacaacccaagagctaatgtttaccgtatggacaatgatattccatattcatggggaactgctgtcaatgtacagatgatggctttcggcaacatgggagagacatccggtacaggtgttgcctttacccgtgacccggcaaccggtgagaatcgtcttatgggtgaattccttctgaatgcccagggtgaagatgttgtggccggtgtccgtacaccacagaagatttctcatctgcaggagattatgccggatgtttatgaccagtttgttggtatctgccataaacttgaagaccattacagaaatatgcaggatatggaatttactattgaaaacggtcatctctatatgctgcagactcgtgacggcaaacgtaccgctcaggctgcacttaagattgcctgtgatttagtagatgaaggcatgatttctgaaaaaagggcagtggccatgattgacccgcgtaaccttgatacattgcttcatccacagtttgaccaggccgctttaaagaatgccgttccaatcggtaaagcccttggtgcttctcctggtgctgcctgcggcaagattgtattttcggcagatgatgccaaagaatgggcagatcggggtgaaaaggttgtgcttgtccgtcttgagacatccccggaggatatcgaaggcatgaaggcagctcagggcatcctgactgttcgcggtggtatgacatcccatgcagcggttgtggcccgtggtatgggtaaatgttgtgtatctggatgcggcgatatcgtcatggatgaagagaataaacgctttaccctcggtggcaaagaatatcacgaaggtgatgctatttccatagatggttcaacaggcaagatttatgcaggtattattccaaccgttgatgcaactattgccggtgaattcgaacgtattatgagttgggcggacaagtaccgcactatgggtgttcgtaccaatgcagatacacctagagacgccagaaaagcccgtgaactcggtgcacagggtatcggtctttgccgtaccgagcatatgttcttcggcgagggcagaattgatgctttccgtgaaatgatctgtgcagagacgaaggaagaacgcgaaaaagcgcttgagaagattctgccgtatcagcaggatgactttgaacagatttatgaggccatggaaggactgccggtaacgattcgtttccttgacccgccattgcatgaatttgttcctacagaggaagaggatattgagaaattagcaaaagctcaaggcaagagcattgatcatattaaaggcatcattcagggactccatgaattcaacccgatgatgggacaccgcggctgccgtttaagtgtcacctatcctgagattgctgtcatgcagacaagagcagttattcgtgccgccatcaaagtccagaaggcacatcctgaatggacactggtgcctgagattatgattccgctggtaggcgaaatcaaggaattaaaatatgtcaagaaaactgttgtagaaacagcggatgcagaaattaaagcatctggtattgatctgaaatatgaagttggtacaatgattgaaattccgagagcagcactgacagcggatgagattgcatccgaggcagacttcttcagtttcggaaccaacgatttgacacagatgactttcggattttcaagagatgatgcaggcaagttcttaaacgcttactatgatgccaagatttatgagagtgacccatttgccaaggtagatcagaagggtgtcggcaaactgatgaagatggctattgaccttggccgtccggttaatccgaaactgcatatcggtgtctgcggcgagcatggcggcgacccgtcatccgtggaattcttcaataaaataggtctggattatgtgtcctgttcaccgttcagagtgccaatcgcaagattggcagcagcccagagtgcgataaaaatggcagaggcgaaataatacagatattacagggcaaaagcttttatccacttttagggcaaagttttcagccagtaagtaatatcaaactcacgtaaaaatgagtgcaaaaataagtgcaagtttacatcaaactcacataagtaatcacatcattttacgtgaactgtccaagcataaattaagactcttggaactttggagaacgaccataagagatgtaaaagtctctttagggaatacctctaaagtttcaggagtcttttttgctacacaatttgcttgtaaaaattgcaagtaaaattattgcttacaagttaatgtgcttgtacattcaaaagaatgaccttgtaacctataatgaatttcttaccagtttactctggattttaccagttggttctggaaagtatcatcttatcaagtaatgtggggttacttgataaagccaagtaattggcaaaggaaacatctttgagaataataacataatcgttagaaagtgttatttccagtgtattgtttggtttccattgggtactaagaatattcataatatcacctctttcctctgcacagtattaatctgttgtataagtgttgcagcctgttattggtactaacagacctcaatattattatacgagaatagcaaagaaaagaggaactgataaatggttacagggtcttttttgttaataaataggctattataagctcaaacaggctattggcaacagtttttgatgattggagaaaagccttattttaagggctttcaaggggcttgatttacacataaaatacgaattttatgaggaacaaaaactctgataagcacattctgataaagaataacctctgataatttgataatgtgaccgtctaatatagacacgctactataacagatacgctacaaaaagaaaaggctactctactgtgaatagagcaaccttttcaagaattaagctacatgatgaacatggtacatttccagctcattaagcatagcttcaattgatagtttgtcagcagcagttaaataagacaacaactgctgatattcagtgaaagtaatgttttcatagactattacctcaccgttggaaaattgaattttaagtaaggacgaatcccaagataaactatcaattttaccaaaaccaatattgaaattaatatccataacgaacacctcccttctgtatagggttatatagtaaagctctggcgagagagctgaactaacctagacagaactaacttaaacagaactaacctagacagaactttctgtaagcaactcttaggcagaggaaatttgatggtaggacatcaaaaaatcctccacttattattatacgagaaatcgtatgaaagtaggaactgcttacaggttgagaacacctaagactggactaggggagggtggtgggagaggtaagcgtaaatctaaaagcgaacagctttaagcgtaaatcagtagacggttatattatcaagttatcagaggtgcaacttgtcagagatataattcatcagaggtaaggatatagagaattatctccaaaattcaaaagtcttattttgtgtttggaacataaatgaacagggaaatctctgaagggcaaaatggtagaaacaataaaagtggatacgacagttgataggataaggtctaaaagtaaagaggatagaacttttgccttaaaactggataatcacttttgccctatgacaacagatgttagaggggaaagttaaatagcctgtaaaagggcaaatttcccaaccaacagaataaatgtccaagcataaaaattgaccttgtaggtctgtagcaatacagacccacagggtcttttttgttattcaaatagagcgaaaaccttgattttaagcgatttttcgcacttcaataaaacacaaattttatttagtatttcttcaaaatatttccgggtatctttgaattgttgttgcaaagaagttgaagcaacaaatgttttgaaaaacactgtaaaatcaaggtataacaacatctctagctataataatgagttatagcttctatttaaaatatgcatatttcttatacaccaatctgtggtagaatagtagcagagtgacaagaacagaaaggaaatttcatgatggataaaggaacaatctttaaattttataacgaccttgatacagaccagatcattgcatcccagtatctgctgctgccgaatctggaggaaatgaaagcccatactttcgaatctcaagatcctgattttgcaaagaaggtaaaacctggtgattatgtggtagccggggagaacttcggctgcggttcttcaagagaacaggcacctggcgttttaaaagcccttggtgtaaaggctgttattgccaaatcatttgccagaatctttttcagaaatgccattaatatcggacttccggccattgtctgtaaagatcttccagatgatgttcagacaggagacaccatggaacttcatatgtctgagggtacggttgaagccaatggcaagacttatacatgtaccaagcttccggagtatatgcagcatattttaaatcagggcggcttaatcgcttctttgaacaaagaggaggacaggtaagatgggaatgacaattgcagagaaaattattgccgctgccgcaggtgttgagagtgtacgtcccggcgatattcatacagtgaatcttgacagaatgatgagcaatgacggcacaacgcatctgaccgttgatatgtacaataaccagctgaatcatccacatatcgcagatccaaagaaactggtttttattgttgaccataatgtaccgtccgacaatccgaagacagccgcctcccagaagaagatgagagattttgccagagaaaacggtattgatttctgggaaggaaaaggtgtctgccaccagatcatgatggagaattatgtctgttcaggagaattgattttcggtgcagacagccatacatgttcttacggtgccataggtgcattcggtaccggtgtgggctgtacagacttcctttacggtatggttacaggtacatcctgggtactggtgcccgaaacagtgaagttcaacctgatcggcaaactgcctgatggtgtttatgccagagatttaatccttgagatcattggtaccgtgggtgccaacggatgcaactatcaggtcatggaatttacaggcgagggtgcgaagacactgagcatttcagatcgtatcgcgctttgcaacatggcagttgaagccggtgcgaagacaggtatttttgaaccggatgagaaagccattgcttatctcgaagaacacggacgtaagcctaaagccgtttatcacagtgatccggatgcagtttacgccagagaatatacatttgacttatccaagattcgtcccgttgtcgcaaaacctgacttcgtagacaatctctgtccggctgaagaagtgcgcggtattaagattgatgaagcattccttggttcctgcaacaacggccgtattgaagaccttcgtgttggtgcgtccattctcaaagggcataaagttgctgacagtgtacgttttcttgttgtcccggccagccttgaaatctacaaacaggctttaaaagagggcctgattgatatctttatggatgccggtgccattgtcatgaatccaaactgcagtgtctgctggggcagctgccagggtgttatcggtgagaatgaagttctcatcagtacaggtacacgtaacttcaaagggcgtgccggacatccaagctccaaggtttatcttggctccgcagcaacagtcacagcatctgccattgcagggaaaattgctttagctgaagatattcagtaattccgtaatccgttgaacaatacataataacaacattgaaatgacgatgaggtgtaacagacatggaaaatatgacaggtaaggtatggatattgggagacgatatcgacacagatatcattatcccgacagagtatctggccatgaaaacaatcgatgatatgaaacagtatgctttcagtccgctgcgtcctgaactggcaggccagattcagaaaggggacatcattgtagccggcaagaatttcggctgcggctcttcaagagaacaggcaccggagattatcaaagcactggggattcagtgcgtcattgcaaaatcttttgcaagaatctttttcagaaacgctattaacaacggtctgcttttaatcgaacagccagatctttatgacgatatcaaagagggcgacaccatcacagttcatatgaataaacatgtggattacaacggcaaagaatatccgattgctgcccttcctgaaaatctcatgcgcattattcaggccggtggccttgtaggcgccatgcgcaaactgaatggactggattaggagaaaggagcagacaatgggcgagacgattattgaaaagattatcagacataatacgggaaaaagtgtcaaaccgggtgatattgtcacagtcaatgtagaccgggtcatgatccatgatatttttattcctttcgtagcagagaaatttgaagaaatgggcttttccaagctttatgatccggaaaaagtcattttaatctatgaccatcttgttccggccagccagctggatgatacaagacattttcgcatcggtgatgcttttgcggccaaatacggcatgcctcatgtccacagaagcgacggtatctgccatcagctcatgacagaagcaggctatgtgaagccgggggatgttgttttcggcactgacagtcatacaaccacctacggctgtgtcggcgcattttcatccggtatcggctatacagagatggccagtattcttggtacaggcacgatgtggatcaaggtgcctgaaaccatcaaggtcgttatcgagggcgaacttccggctaacgttatgtccaaggatattatccttcgattgattggtgatcttggcgcagatggtgctacttataaggcccttgaatttttcggcagcacggttgacaatatgtcggttgccagccgaatgaccatgtccaacatggcagttgaagccggtgccaaatgtgctttatttacaccggatgagaagaccgccaagtactgtgacattgaattaaatgattaccagaaaagcttaaaaggtgatgccgatgccgtttatgtcagaacactgacttatcgtgcagaggattttgtccctgttatggcctgcccttcacaggtggataagattcgtgacgtcagcacccttgaaggaacaccgatcgatcaggtattcatcggttcctgcactaacggccgtcttgaagacctggccgctgctgcagaagttttgaaggggcagaaagtagctgattatgtgaagttgatcgttacccctgccagccgtaagatttacaaacaggctatggatcttggcatcatggaaacactggcagaagccggagccatcattactcatccgggctgtggtctttgctgcggtcgaacaggcggtatcctgtctgatggtgaacgtgtagtggctaccaataaccgcaacttccttggtcgtatgggcacttccaaggttgagattttcctggcttcaccaagaacagcagctgcctgtgcagtggccggcaaaattgtcactccgaaataaacagacaatctttctaactgcccgcaaattatcattataaataaattcattctatgaaaaaccgtgtttgtatttttctgtgcaaatgcggtttttccctttttttctcttccgttattccggaatttggattatactgtttttatatttttctgcatcctattgcagatcttttgtttacgatgggaggaaatcatattgaataaactactaaaaacacaatccgcccccaggattattgccggcggctttgccctggtaatttttatcggttcgctattgctgatgctgccatgcagcattcagcccggcacgcatttggattacattgatgccttatacacatctgccagtgccgtctgtgtcaccggcctgacagtggtggatgccggtgatactttcacggctctcgggcaatttttcctggctgcgctgatccagattggcggcttaggtgtcacatccatcagtgccggcgtcattctggccatgggcagacgcgtcaacctaaaagggcgaatgctcattcgtgagtccatgaatctggatgcagaccggggactgattggttttgtctataccgtttttaaagccacactgctaatcgaattgatcggcgcagcattgagtttcattgtttttatacaggattattccctgttcagggccatcggtgtcagtctgttccattccgttgcctcttttaataatgccggatttgacattttgggtggcggacagagcatggttccctatacggataatatttttctgaatatcattacctgtgtcctcatctttttcggcggcatcggcttccttgttattcaagaattatggcaaaagaaatgtcaatggaagaaactgtccatgcataccaaagtcgtcttatcggtcagtctggctttgatcatcatcggtactttattgatcaaattaacagaacccgtttcatggttatgtgcgctgtttcacagtgtttccacccgaacagccggttttgcctcacgtcctatcggtgatttcggtgctcctgcattacttgtgatgatcgtgctgatgtttatcggtgcatcttcgggatcaacaggcggcggcatcaagacgagcaccttttttgtcttgatccgggggattttttcagcagccaccaaccagtcggaaaaggcctttcattattctattccgaaagatgccttcaaaaaagctgctgttatttccattctggcggcaggtgtcgtcatcacatccacctacattctgatgatcctggaaccgcaggtggatctgctagatgcattattcgaaatgaccagcgtcttttcaactgccggattatcaactggtatttcatccgatctgcatcttcctgccaaaatactttcaatcatgataatgtttaccggaagactcggaccactgaccattgcctctttatggtatttttcacgtggagaactcgcactttatcctgacggcaatattgttgtcggataacgtcagaccaatatttcaacagacaggagataaaaatgttaagtttaaaaaataattcatattgttccaggaactccaaaaataaaaacatgacttacggtatcgtgggtctcggccgtttcggttcggcactggccatggatctggcttcagccggagcagagatcgttgtaatggataaaaacgaggaaagggtccgaaccctgcgtgaaatgactgaacatgcctacgttgttgcaaatctggacaaaaaaacgctcattgaaaccggtatccagaactgtgatgtcgccatcgtctgcattgccgaacatctggatacatccatactgacgactctcaaccttgtctcactgggtattccaagagttattgccaaagcagcaaccgcagagcatggggttattcttgagaaactgggagcggaagttgtttttcctgaacgggatatggccatccgccttgcaagccgccttgaaaattcacataatctcgatatagttcaattgagcgaacagattaatatatccaaaacaattgtggcaaatgaggcaatcgggttaagtgtcagagatatcaacctcagagaacgctttggcctgaatatcattgccattcaaagtgacgatatcgttattaatcttgtaacaccggattatagattcaaagaaggggacattctctttgtttccggatccaaagaaggtattttcaaactcaatcagtggctcaacgattaagatgcttttctgatgcatttgccctatatacttatattataaagccatgatttgatggcaaatccgatgcaaaatcggcagataaatgcctgcactcaaaaatggcatcagacaggaggaataaaccatgatacgcattttgatcgtagaagatgagaagcctatttccaatctgatcagactgagtctgacaaaagcaggctatcactgtacctgcgtttatgacggcaatgcagctgtcgataaattagaccgggaaatatttgatttgatcttgctggatatcatgctgcccggtgccaacggatttgaactgatggattatatcagacctctggggattcctgttatttttctcaccgctgtcaattcggtgaataaccgtgtccgcggtctgaaaatgggcgcagaggattatattatcaagccatttgaaattgtggaattgctggcccgagtagaagtcgtgcttcgccgttacaacaagatgatccagcacctgcatgctgcggggattgatatcgataccgtcagtatgacagtaaaaagagacgatgaagaaatccagcttaccaacaaagaatatgagctgttactattatttgccagaaatccgggcatcgcactttacaaagaaaccatttacgagcgggtatggggcggagagtatgtaccgggttccagaaccgttgagctgcatatacagcgcatgcgcaaaaaggtcggctgggaaaaagcccttattaccattccaaaagtcggttacagattggtggacacaacatgaaatttaaatacaaagtcatgctttacatgacagcttttttatcttttttctatgtggtcagcgcctgtctgcttatttttgtgtcttttcagatgtctctgaacaaagaaaaagccaatgccctcaatgcctaccgaatgatccagaatatgttgcttgtttccaatgatatgaatcaaaaggcttatacatacacgttgagtcagcttgccagtcagaacgattcgatgtggaaaggcatccgactcaaacagaccggcagtggaacgctgtattacgaaaacggatatcttccatatcatctgaacgatgaagatatccgcacaatgaaaacggaagaatgttgtcttatacggtatatccaaaccgaggatgggcaatatattcaggtttcaggcctggttgagaccggcagtgttcctttaagtcttgaagtctcccaggatgtgacacaagtttatacggccagagagacgcagctccagatttacaaagttattctcgcctttgttttgacagccggttctgtcagtgcgctgctcattgccgaaaaactgacaaaacctattcgtcaactttctgatgtttccaaaaaaatcacggacggcaatttatcaattcgggctgatattcattccggcgatgaaattgagctgctggcccgggattttaatcggatgacagatactattgaagacaatatgcaccaaatggcagatgccatgaaacgtcaggaagaatttatgggaagctttgcccatgaattaaagacgccgatgacatccatcatcggctatgcagacttgatgcgcagtcaggcccttgatgaagaagagcagcaggaagcagcagaatacattttctccgagggacgaagattggaaagtctgtcacttaaattgctggatctgctggttcttaagaaaaaggattttgaacttcgtccgacaaatctgcagaccgtgattgaaggcgccgtacacacagcacttccatccatggcggacaaaaatatcagcttaaaagggcgttatgatgacggattttgcctgatggagtctgatcttgtaaagtccctgatcattaatctcattgacaatgccaaaaaggccatagacgacagcggaaacattctggtagttggacgactgacagaagaagggtgcctgattaccgtggccgatacagggcgcggtatgaagccggaggaactgtcccgcattacagaagccttttaccgggtagacaaatcccgttccagggctcagggcggtgccggactcggtttggctctgtgtcaggcaatcgctgaactgcatcacggtcagcttatttttgagagtacaccgggaaaaggcacagtggttaaagctgttttaaacggaggtcggacaaaatgcgaataaaaaagaattatctgacactgcttgccataacccttgctgtgattattttgtgttttatgctcccatctgctttatttcaattttacgatactgaatggaccgagaaaagagtagagaaatccgccaatgtctccggattaaatattgacagtatgtctctaagtgaaaaaatccagctcatctataatctggacaccatcgaagcggcattaaacggcgaaacggatacattgcttgaagtcgctgtgttgagccgtggttacaaactgacaaaggaagaagcctggagcaatatcatcactgaattcatgaaacttgcagatggactggaaacactgatgcctgaattctataaatacatcgcatctatacaggactacaatgatgccatgaaatatacggattcagatgccattctacctatcctggtcacggatcagaacggtaattcaaccattctatgggtgatgacttttcagatggatagttattttgctgctgaacagccaagtgacagctatcctatgccatttgcacagctctactatgatgaaagcagtggctatctgttgggcatggaaatctatgatctggatatgagtcaattagaggactttgaattaaatattcttcaggatgcaaatgaagaaacaactgaacttcctcttgagcagcgtattgccggatattttctgaagcgctacgcaaactatgtgggatgggacaacagccggaatcagatggattggtcctatatggattattatgcgtcgttggaaatttccaatggcaatgaggctcttgatctgaagtgttatgttcttattgaagattgtatcgatgcagaggaccacctcatgctgaacattaaactgaatcgggaatcctaaattcctatgcactaaaaagcatcgccgggttttactcggcgatgctctgcatatatggctttaaagcggacagtacaagtgtatacgtcatcctggccatactctcaggtgtatcttcaaaatcatgcttcatccaactaatgatcaaacctatacatcctgcaatgcagaatccattgacgctctcaagggttcgctcatccaattgttccagataaggcttcagatacttcatacaatgacttgaaataatctgttcaatctgacgcataaaggcaacatccccatgcgggccaagcaaagccgatgcaatctctctattgtcagcaataaatgcaaacaactctgtaatataaggcattgtttcttccattctcaatcgttggtcattattaacaatttccagaatctcgttcttcagatcattctctgtctgttcaagtaagtcatagatatccgtataatgaagataaaatgtagagcgattgatatcaacttcctccacaagctccttaacggtaatctccttaatcgtcttttcctttaataatttagccaatccgctcctcaattgggctttggtctttctgatgcggcgatctgtcttttcagccatcatttgttcctccatttatctatttatatgtccaatcaaatgtatataaatcaacattatatctattaaactatacaataattattaaaaattatcaagtcttgaattaaaatttgccaggtaaatctcgctgtggtatcatataaataaaaaagatgtatgcattcatcgcagaaaggatgatttatatgggaaaataccaaagagtttttctgattgtattggattctctcggtatcggtgctatgccggacgccaaacgtttcggcgacaccggtgctgacacgcttggccatatcagtgataccgttgcccatctgaatatacccaatttacaaaaacttggattggccaatctgcaccccctcaaacaggtacctgctgttgaacatcccatggcttgttgtgcccgactgtttgagaaaagcaacggcaaagacacaatgacagggcactgggagatgatgggcattgaaacaaagaagccctttaaaaccttcactgaacacggctttccgccagacctgatcgctgccctggaagaaaaaaccggccataaagtcattggcaataaaagtgccagtggtaccgttattcttgatgaactgggtgaagaggaaattgcaacgggtcatatgatcgtttatacttctgcggactctgtaatgcagatatgcggcaatgaagaaacttttgatctgaaagaactttatcgatgctgcgaaatagccagagaattaacgttaaaagatgaatggcgtgtcggccgtgtcattgccaggccttatgtcggcaaaaaacgcggtgagtttgtccgcacaagcaatcgccatgattatgccttaaaaccgacaggattgacggccttaaatgccctaaaagatgccggttacagttgtatttccgttggaaagatctatgacatctttgacagtgagggtctgacagaatccaataaatccaaaagttccgttcatggcatggaacagacaatcgatattgccggtagagattttaatggattatgctttacaaatctggtagattttgatgccctttgggggcatcgccgtaatccaattggttatggtgaagaaattgaacgttttgacgttaagcttggtgaattacttaatgttttacgcaaggatgaccttttgattctgacagcggatcacggcaatgatcctacctatataggtactgaccatacacgtgaaaccgtaccgatgatcgcctattcaccatctatgaaggcatcaggtattcttaaggagcgagacgcatttcacaattttgctgtccttggggcaaccatcactgagaacttcggagtaaatatgccagaaggaacaatcggtgaatctatcctggatttactgcaataaaaaaagacataaaaagggcggcctataagaattagaagagcttagtatgcggccgcccgaaatatgtaacacctacattgtatcagctaatggctatgcgatgcaagcaaattgcagaattacaccctaagaaacggtaaagaaaaattaaagaccaattatacgaaaagagatggttacatgatgacagcaaaaaaagaatttatgtattggcgaaccaataaggaatagtacagaattaattcagagaaagattgctttgaacttacagataaagttcctgagagggccagaaaaagttttgaattgtatcaaaaattacaaaagagcaggcaaatgtgactagatgctatagtcatatgtgaggcaggtgatttttaatgaattttttaaaggcttgcgagtctgcatagaggtgcccgaacagtataaatgagggaggatccagtaaatgattagtctggaaatagcctgcaaaaatgcagagacaatgatgttaaaatacggctatgtaaaaggtttcttagatatcagggaaactgatacaaaatggttttttgtaggcagtttaagtgaagatgggccaactccttttgcagccgttccgttttttgtcaaaaaagaaaatggtgaatgtagcatggtattgaaatcagagataaatgctatgtgtgaatgttgcaatgctcctaaagtagaaataccttcagaatttcaatataaaattaaatcacattaaacaattagtgttccattttggtgataatgaaggcatagagattgttcgtaagccagaaaaacatgcagtaatcggacgtcagattcatagtctttatggaatgcatcgtgatgaatttaaaaagggtattttcaaagagaagatagcatatgaggcgtaaaaataaagagtgatttatatgattaatacattgaatatgcctgctcatgagcgattacgtttattgcgtaatggcgaaaaagttttgtgcaaaaaaaggaccgtgttacctgttggcaatcgtgaaaaaacaaatactttttattgtgatttttgcaaaaaccagttcattatcaactgattagacggagatttgaaaacgacccaaaacgatgtggtttttttgtaaatgcagcttattttcctgcatttacaaaaaaagcggtctccataaggaaaccgctcatgagcagataaggggagtcgaacccccctctccagcttgggaagctagcattctaccgatgaaacatatctgcatacaattattgtaaccgattataaaaaatatttcaagccaatttataaaataaaggcaatatttttaaatactcagccaattagcaatgcaaatcttttaaattatttatctatcgattatctacccgttccggatacatatcatggttggccagacgcatggctgcgatttcttcccattttgtgcccggtttgccatagttgcagtaaggatcgatggaaataccgcctcttggcaggaattttccccatacctcaatatatttcggatccatcaatttaatcagatcttccataataatattcatacagtcctcatgaaaatctccatgatttctaaagctgaaaagatacagttttaaagacttgctttcaaccattctttcagatggaacataagaaataataacattgccaaaatccggctgcccggtcatcgggcaaaggcttgtaaactccggacaattaaattttacaaaataatcatgatccggatgtttattaatgaatgtttccaaaacttcagggcagtagttaaaatcatatttcgttccctgacttccaagatgggtaataccagctgtttcttctttggtacgtcctgacataattcttctccttttttcaaattccgcccggcacttatagcgcagggtcagcaacaccattggcagcaaatgctttagctcggtcaatacatgtgccacattttccacatggcttctcgccgccttcataacaactccacgtcaattcataaggtacgttcagttccagaccttttttgacaacatctgcctttgtcagattcacaaaaggtgcttccactttcagctgatgtccgctgccttcataaattgcctggttcatggcatttttgaatacttcgctgcaatccggataagcattgccagccgcatcgtcactgtgtgcgccatagtaaatcacatcacagccctttgaaagggcaatacttgcagcagaagagagaaacagaccgttacggaaaggcacataggtcgaaaccggcttgccgtcgctgtgctgcagctgttctgcgtaggattcctccggaattgcctgatctgaatggctcaggagagagcagtcgctgtactggaaaatcggtgtgagatcaagatgcagcatttctacatgataatatgcagccacagcttttgcagcttctatttcttttgtatgtcgctgtccgtaagtaatggcaagagcgatcacattgtcactgccatatttatctacagcaagtccgagacaggttgtactgtcaacgccgccgctggataacacaagtgctttcatgataaagtcctccttattactgcatcatcacacgcatttgcagtgatgcatcggttttaaaacgtcccgtaaatgttgttgtcaatgttttagcagccgttttcttgatgccgcgggcagtcatgcagctatgacagccttcaatcttgacagcaatcgaatctgaacctgtaacttccgccatgatttctgcaatatcagaaccgatccgttcctgcagctgcagacgcttggcagccatatcggcaattctggcgatcttgcttaaaccaataaccttgccgttcggtatataggccacagaaactttcatatcatacatgagtgccatatgatgttcacaatagctgaaaatttcaatatctctgacatagaccatgtcgtcacttttgccggataattccagatcctgctcaaatgttttgtcaaacatctgcgcaatttcatgattggtataattcataccctcgaatacttcttcatacatttttgcaacacgttccggggtctctttcagtccctcacgctcaggatcatctcccaaagctacgagaataccacgcacatgttccttaattgcctctgtatctatagccattctttcataacctcctacacaccgcgcctgtcgggatcccagatgactttatgcatctgaatctggagattgacgccatttaattgttgctctttcataaattctacaatatctgccggatcaatactgccaaaaaccgggctgaaataaagatgacagcgtccaatcagccggaattgtttcattatttccacggcccgttcacagtctgccaaagagcccgtgacaaatttgaccgtatctttttctgtaagcagtgaaaaattatctgtatccatagcggtctccatgccgctgcaggacaacttataatccattgtaaaagacggcctgttggggatattcacaaaaggagccagactgacactgccgtttgtttctatctccacatgcagcaaatgatccgcggccagtttctccaataattctgaaatatacggccggtccaaaggttcaccgccggtcagtgtcacattgcggactccggtttccatgattgcctgatgaatttcttctgccgtcatcactctggccggcacatccggctcattggcccactttgtgtcacaatacagacacgataaattgcagcccttgaaacggacaaatactgcaagctggcctgccaacgggccctcaccgttaatgctgacaaaatgttctactacctcatatgtcctttccatctcttattcctcatatgacgcgcagttattcggggtctcatacactgtcgagcgatgaacatgataaccgcatgccgtcagtctctcataaaaataataagccagtctttctgctgtcggtcggtatggaatctcaataatcctgaaattctccgcctgcagtgctgccatagtcgcaggcatcagactgcctttttcaatgatcaacgcgtggtccatggcatccacttcacgcttgacatccttttttaattgaccgaaatcaaacatcatatcccttgtctggccttcttcatccagatccgggcggcagatctcaatcacaacacgccattcatggccgtgaatattgcggcatttaccctcataacctgccagaaaatgtgcagaatcaaaactatgttcagtcttcaaataatacatgattatagtaccttcctgatttattgatcacttatatacggattacccaatgtgtttcctatacaataataaaagggacacagcaatgctatgtccctgatgttccggtttcatagccctggttttgtttatagacaggatggtgcaatcgaactgtcttttattgttatagcattggacattcacagtgtcaagtagtttcagctttttttgcggatgacaaatagattctgatgtggtagaatgtaaaaaaatacaggagtaaaaatatgaatagacaaaagataatggcgaaccgccgcagagatattattatcattgttggctgcaccattttggcgcttatcggtggttacggctggtcaagaggctttggcaattttacgtggtttcgtaattttgacactcccggcactgccagcgtagacgatgctgttctgaattatgagcccctgattcaacaatatgccaaagaatacggcattgaatcctatgtcccagtcatcgaagcattgatgcagcaggagagcagcggccttggcgcagatgttatgcagtgttccgaatgctactacaatacagaatatgatcagacgcccggcagtatccaggatcctgaatattctatcaaaaccggtattcattattttgcagactgccttgaactggccggatgtaaagggcctggagatatacgcagactccggttggcgctgcagggctacaacttcggacataactatattgaatgggccatcaaacgtgacggcggctatacggaagccaatgcccaggctttctcagacatgatgaaagagcagcttggctgggagacctatggcgatacgacttatccggagcatgtacttcgctattataagtaagcagagaaatggaaaggaagattttaatatgagtaaataccttgttgttgttgatatgcagaaagactttattgatggttcccttggaacaaaagaagcacaggcgattgttccaaaagtcatagagaaggtcgccgaattcaaaggacctgtgatgttcacacgcgatacgcacgaagagaattatcttgaaactcaggaaggtcagaatctgcctgttgaacattgtatcagaggcacggaaggctgggagctgcagcctgaactgaatgaatatgcactcaagaatcactgcctgatttttgacaaaccaaccttcggatcaaccagtcttgccggatgtgtcagcggaattgcacgtatggcacctatcgatcagattgaacttgttggtctctgtactgatatctgcgttatttccaacgctattcttcttaagactgcacttcctgatacagagattattgttgatgcttcctgctgtgcaggcgtgactcctcagagccacaagaatgcacttgaagccatgaaaatgtgccagattaccattgtcggagaataaggagcctttttcatgaaaaaaaacaacatacacagccagcaggacactgtacagactgaacacctgagtagacgccatttctacataattatagtccttattgtgattatacttgttgctttgattgcgcatacgatcctgcgtccggacagaaatgctaccctcaggattatttacacaagcgatatgcaggggcagatcacctattcagacggacaatacgccggttacgaaaaagttgctgccctcagccataagctgtcctccgaaggtgatcatgtcctgcttcttgatgcaggcaactgtcttggagacagtgttatcgctgaaatggacaatggccagtccattctttctttgatgaatacaatgcaatatgatgcaatggtacccggtccaatggattttgtttatggtgcagataccctttcatctctccgatccaaagccagttttccatttcttgcagccaatatcaccaaggccgacggcagtacggtttttgaaaactacaagattctgaatatcaacagtgttcgtatcggtgtgatcggtgtaaccaccggtctcagtcagactcaggcacaaaagagcagtctgacagtggccgaccctgtagaaaccgtgaagaatgtccttagtcagatgtccgggaagacagatgcagtgatcgttcttacctacacaggcagcgaagatatcacgaatgcacttgccgctatagacggtgtcagcattgtcattgaaagcggcgcttcagaagcttttgccaatacagcagacaacggtacagtcattacttctgccggcacaaaaggcaatataatcggtgtcgccagccttgatattaaccgatcagatgtttctgttgacagtcagttctatacatcttctgattacagcagcttatcggcagaacagtctgtagctgatgcggtggcaagtgttgtccgttcagctgataccaatgcctctgaacatgcaggttctatcactctgtcgaccgatacagctgccgacacagctgaaacagaatcagacacatcagatgaaacagccgacacattagaagatggctccgctgacagcgacgtccggacctatcatttagctgaaacaggcatcggcaacctgactgctgacgctatgctggatgcagctgcatcggacggcgcagttgttgcactcatgccggatcaattgatttccggtacactggccaatggtattgtttcaaaaggacaggtccagaacctgtttgacgaccagttataccttgtcacctgtaaaatgaccggcggcgatctgaggaccgccctagagaacagctttaataattatccaaatgcagacggttttcttcaggtttcgggtatttcatatacctttaatgcctcaactgccatcggaagccgtttatccgatattatgatcgatggtcacaagctggacgatgcccgaacatatattgttgccaccacgaatatactggcggacaccctgggttatcgttcagaagctaccggacgcgtcggtacatatcggaccattgcttctgttgtaacggattatattcaaaagaattcctcggctacatcaggttcagcactgccatctgaaacagaatcagacacagaagataccactgcatccggcgaaacagccgatacgtcaagaatacagatcaatgaataaaatatccgtgatcggacacactgtctaaaaaaggagtatccgatcatgcaggaaaatgaatccaatgaatctgacaaacctacccaggatgaacagatccgtgaatacgggcaggttgttttaaaggccaatgcaggcaaacatcgcatctttctgttatccattattggtgaagtagaaggtcatgagcaatctccgggaaatgtcaaaaccaccaagtacgaacacgttctcccacagttggccatggcagaagacagttgcgacatcgacggcatccttgttcttttgaacaccatgggtggagatgtggaagccggccttgccattgccgagatgatagcctccataagcaaaccgacagtatctcttgtgcttggcggcagtcactcaatcggggttccgctggctgtctcagcggactattctttcatcgtacccagtggaaccatgatcattcatcctgtcagaatgaatggcatggttattggtgtgatacagacatatgaatatttcgagcgtatacaggaacgcattttgaattttattgtcaccaattcccgtatcgccaaaagccatctgaaaaagctgatgcttgatacaagcaagctggccaaagatgtcggaaccgttcttgacggtcaggaaaccgttgactgcggccttattgatgccattggcggaatcagcgatgccctggccaaattaaacgaaatgattgacgaatttcaaattcgctcttgttaaagctttcaatatgtagtaaaatgcaaatagcgtgtaagaggttgttgcagacaacgggcagcagcctcttttttatgatacttcgctatgaataatttggaggaatttttatatgagtttactgcagtcaattttaatgggtatcattcagggtgcgaccgaatttcttccggtcagcagttccggacatttggctctgttcaagattattttcaatgtgaatacagaaacaggccttttatttgatacaatgctgcatcttggcacactggttgccgtctgcattgtttactggaaggatgtccgcaatctgatcgttgccgcatttcaattgttatttgacattattgccaatttcaagacatggatcagcaacaagaagaatggagagcataccgcttatcgccgtctgatcaacagtgcttacaagaagtttgttgtactgattctcattacgacgattccaacaggcattatgggtgtggctttcagctctctgattgaaagagcttcacagacattacttgttccgggtatctgtcttgtgatcacagccattcttcttctgatttccgacacacgtccaagtggccacaaaaaagtgaagaagacgacttatgcgaacgccgctgttattggtgttgctcagggttttgcaacatttcctggcctttcccgttccggaacaactattacagcctgtctgatgcttggtttcgaccgtgcttacgctgttaagtattcattcctggcttcacttcctgcaattttgggtgccaacattctggagctgagacattttgatgctgctgcagttgccggcagttcaattgcttactattttattggtatgatcgttgccggtgttgttggttacatatgtatcaagctgatgatctatattgtacgttccaataagttccagtattttgcttattactgtgcagtcgtaggtatcattgccattattgcctatttcgtaaaaggctgatttacattaagataataagattctgataatgcggaatatcaaaggtcattgatatttcgcatttattttccagatcactatttcaaactgcaatttgactgaatatttatttttactgattttataaaggagtgattagatggcgggaaagcagagcagtgaagtcaaacgccgtactgcatcgaccagaaaaacaactacaacaaggaaatcatccgccggaaagaagcggaacacatccgggaaatctgccaatacaaaggcatcgcgcatgcaagtcagtgaatatacagaacctgtgggagatgagatcaaattgatcattatccttgcagtttcaattctcatcttactcagcgtgtttggccttggcggaagagtcggagacaaagcggcctatctcttttttggccttttcggatttgttgcttatgcgcttccttttcttctttttatcggcagcgcctttcacatatccaaccgcggcagtcgtcttgcacggattaaattgacagcagccactgttttcctgattatgatcatggcattgatggcactggctgatagttcttttgacggcacagcctctgtactggatggttttctcaattcagctgctgctcacaacggcggcggtctgatcgggttcagtctgagctgggttcttttcaatgcctttggacgtgccggatctaccgttattcttgtatgtctgatgctggtttccggtgtattgattaccggcaaacggatttttatccgcctgggcactttaatcggacatatgatgaccgatatgggacagcacttcaacgcatggcgtgagaaacgggcccgcgaacgtcttgcccgtatggaagcgaaggcagctgaagaagacagcctgcctgaggatgaagcatatgaaaatattgatgaagaaaccgtttccatacagcctaagaaaaaggcagccaatatcattatcccgtcaaggaaaaaggaaaatgtcaagtccaaggatcctgcaccggcatcttcatcagaacccgttttgcagacttataccgaagagtcagctacatccgctgagacagcggtcatttctgacgattccaaacagccgtcccttgacagttttgatcagggacagtctgtccagccgttgcatattcagattcctgaatttatgaccggacatgtttccggcaaatcttctgtaaaggcaccttctgcttccatatcagatatcatgtccaacctgagccgggatatcccatccgaagcggaatcagaaccggagactgagactgtcgaagacaagaagccaaaaggcaagccggtcattgccagaactattttgtctcctgatgatctggagttggaaatagaaggattgccggaggaaacaccggttaatacagacgatacatttatcgatatctccaagattctgtccgagattcctgaaacaacaggaaacatccatacagaagtggcggacatgcaacctgaggacgtttctccggctgcacaggccgaacagcagacagctgtatcaccgacagccgcccgcacttcatccccttcgcatcatacaactgcgaaaggaactgtagatgatacagcttccggttctgatgaaccccttgaaattgtagaagaggagattgaaaaatacgaatttccgccactggatcttcttgatcagggaaaaggcagcggcaatcaacagacagccgcatccctgaaacagactgcgctgaagcttcagcagacatttgaaagttttggtgtaggtgtccaggtaaccaatgtcagctgcggtccagcagttaccagatatgaactccaaccggatcagggtgtgaaagtcagccgtattgtcagtctgtctgatgatatcaagctgaatctggcagttgcagatatccgaattgaggcgccaatcccgggcaaagcagccgtcggtattgaagttccgaatacccacaaggaaatggtgcatctgcgtgatcttcttgagtccgacaagtgtaagcaggcaaagtccaaactggcttttgccgtgggcaaagatatcggcggccagacggttgttgctgatattgaaaagatgccgcatttgctgatcgctggtgcaacgggttccggtaaatccgtctgtatcaatacgatcattatgagcattctcttcagggctgatccgaatgaggtcaagatgatcatgatcgacccgaaagtggtggaattgaatgtttataacggtctcccgcatctgttgattcctgttgttacggatccaaagaaagccgccggttccctgaactgggcagtaaatactatgatggaccgctacaataaatttgccgaaatcggtgccaaagacttgaagagttataatgcccgtgtggagaatctcccatacgaaagtgaacagcacaagaagatgccgcagattatcattatcatcgacgagctggcagacctgatgatggtcgctcaatccgaagttgaagatgccatctgccgactggcccagctggcccgtgcagcaggtattcatctgattattgccacacagcgtccatctgtcaatgttattaccggcctgatcaaagccaacgtaccgtcacgtatcgctttctccgtatcctccggtgtcgattcacgcactattcttgacatgaacggtgctgagaagctgctgggaaacggagacatgctattctatccacagggcctgcagaaaccggtccgcgttcagggtgcctttgtttctgaaaatgagattgcgcgtgtcactgattttatccgtgcccatcttaccagtcaacctgtatacagtgagacgattaaaaagagcatagagacagctgccatcagcagtccttccggcgcatcaggcagtgacaaagatgtttattttgaagaagccggccgtttcatcattgaaaaagataaggcgtccatcggcatgctgcagcgtgtctacaagataggttttaaccgtgctgcccgtattatggaccagctctgtgaagccggtgttgttgggcctgaaattggcaccaaaccgcgtcagatcaagatgacgatggaggaatttgaaacttatctcaatggcaatcaatagtttttttcaacaaagagccatgtaagaagtattactaatagattctataagtaattttaaatatacttattatacgaatcatggtactatcgagaaagataccatggtgaggtcttcctcatcatgttacaagatttgaacaacgttcacctttaatacgcaggaggagttagaatgaaaacagatattgaaattgcacaggaaacagccatgctcccgatcaaagatgtcgctgcatctatcggtgtggaagaagacgaccttgaattatatggtaagtataaagcaaaattttcagatgaatatttaaagaaagttcaatccaatccaaatggcaagcttgtgcttgtcactgcgatcaatccgactccggccggcgaaggtaagacaacaaccactgtcggtctgggtgaagcatttggtcagcttggcaaaaaagccgttattgccttaagagagccttctctcggcccttgcttcggcattaaaggcggtgctgccggcggcggttacgcacaggttgtaccaatggaagacctgaacctgcattttacaggtgattttcatgccattacatctgccaacaatcttctggcagcaatgatggacaatcacatccaacagggcaatgcactggatatcgataccagacagattatctggaaacgatgtctcgatatgaatgatcgtgttctcagaaatgttgttgtcggccttggcaacaagatggatggggttgtacgtgaagatcactttgtcatcacggttgcctctgagatcatggctattctttgtctggcagatgatatggaagatctgaagcaccgtctggcaaagattattgttgcttacaaccgtgccggcgaacctgttacagccggagatctgaatgcggttggtgctatggcagcactcctgaaggatgcgttgaagccgaatctgatccagaccctggaacatacaccggccatcgtccacggcggaccatttgccaatatcgctcatggctgcaatagtgtgcgtgcaacaaagcttgcccttaagatggcagatatcgttgtaacagaagccggttttggtgctgatctcggtgctgagaaattcttcgatatcaaatgtcgtatggctggtctgaaaccggatgctgttgtcctggttgctacagttcgtgccttgaaatataacggcggcgttccaaagacagagacatccgtaccaaatcttgaagcactgaagaaaggtattgtcaaccttgagaagcatattgagaaccttcagaaatacggcgttccgattgtcgttacattgaacgctttcatcacagattctgaagaggagattcatttcgtcaagaacttctgtgaagaaagaggctgtgaatttgcactttccgaagtctgggagaaaggcggcaagggcggcatcgcattggctgagaaggtactcgatacccttgagcataaggagagtcattttgaagtactttatgagaacagcctgtctctgaaagagaagattgaaacagttgccaaagagatttacggtgcagcaaccgttacttatgcacctgctgcagaaaaagcactgaagaaaattacagaaatgggatttggcgatgtgcctgtctgcatggcgaagaatcagtattcattatccgatgatcctaagcttctgggtagacctgaaaacttcaatgtcaatatccgtgaagtttatgtatctgcaggtgcaggatttgtcgttgccattacaggcgctattatgacaatgcctggcttaccgaagaaaccggctgctgagggtattgatgtcaccacagacggtgttatcacaggcttattctaagcagatatacaaccgcacaggaacaaatttaagaaagttgacagcttgtatagtaattttttatgtgatatagtaaaggggatacctgaaaaacaggtatccccttttaaaataaatactctggaggtttggtaaaatggcttttttgattgacgggaagaaaatctcctcccagataaaagatgaattaaaaaccgaaatcgcagaaatgaagaaaaaaggcacagaagtgacattggcagtgatccaggttggaaacgatcctgcttcctctgtctatgtcggcaacaagaagaaagcctgtgcttatatcggtatccgctccctggcatacgaattgcctgagagtacaacagaaatggaattattgacattgatcgatgagctcaacaacagaaaggatgtcaatggtatccttgttcaactgcctgtaccggctcatatcaacgagaaacacattatcgaggctattcacccgttaaaggatgttgacggcttccatccacgcaatgtaggtgcccttgtcacaggtgaagacggttttgtctcctgtacaccggccggcattattcagcttcttaaacgcagcaatatcgatatcgacggcaaagaatgtgttgttgtgggcagaagcaatatcgtcggtaaaccgatggccattcttctccttcgtgaaaatgcaacagtaaccatctgtcattcccacacaaaggacttaaaggaagtctgcaaacgtgcagatattcttgttgctgctatcggcaagccgaaattcttcaaccgcgattatattaaagaaggtgcggttgttattgacgtaggtattcaccgaaatgaacagaacaaactctgcggtgatgtagaccgtgatgatgtcatggatcttgtcagcgctattacaccggtaccgggcggtgtgggaccaatgaccatcgccatgctgatgtataattgtgtagaggctgtacgcctccagaaaacggagagataatatttatgagtaatacaaattccaataacctgacaatcttttttgtttccctgggctgtgataaaaaccttgtggattccgaagtcatgcttggcattcttcgggcgcacggctttacactggtggacgatgaaatggaagcagacatcatcgttgtcaatacatgcagcttcatccatgacgccaaggaggagagtatccagaccatccttgaaatggctgaaatgaaacacagctgcagatgtaaggcactgattgtcaccggatgtatggcagaacgctataaagacgagatcatgacagagattgaagaagtagatgctgtaattggtacaaccagctaccagcatatcgcagaagttgttgctgaagtcttagaaggtcagaaagtcaaacagtttgatgatcttcaggccatgccggaagtggatgttcagcgtatcatgacaaccggcggatacagcagttacctgaagattgccgaaggctgtgacaagcactgtacttactgtattatcccaaagcttcgtggttcctaccgcagtcattctatggattatttgatcaaacaggccgaatcactggctgcccaaggtgttaaggagctgaatatcgttgcccaggagacaaccgtttacggcacagatctttacaacggacagaaaatgctcccggaactcctcaaaaggctctgccgtattgaaggtctttcctggatccgtgtcctctactgttatcctgaagagattaatgaagaactcattcaggtcatcaaagaagaaccgaagatctgtcattatcttgatcttccgatccagcatggcagtgatgctgtcttaaagaggatgggaagacggacaacacaggctgaactcagaagcattatcggacgattaagagaagaaatccctgatattgccctccgaacaacgctgatcgccggtttcccaggcgaaacagaagcagatcatcaggaagtgctgcagttcgtcaaagatatgcgttttgatcgcctcggtgtatttacttattcagaagaagaagggacaccggccgctcagatgccggatcaaattgatgaagctgtcaaagagacacgccgtgatgcattgatgatggctcagcaggccattgcctttgataaatccgaagaaatggtcggaaagacagtggatgtcctgatcgaaggacgtctgccggaggaggatgtctatatcggacgtacttacagagatgcacctgatgtggatggttacgtttttgttcatgctgaagaagatatgatctccggcgatattgtcaaagttaagataacagatgcacaggattacgatctggtaggagatgtgatttatgaatttaccgaataaactgactgttttaagagttatccttgttcctttctttgtattctttctgcttggtgcagactggattggttcattttcaccttatattgccttgattatatttatcgttgccagcctgacggatatgcttgacggcaagatagcccgaaagtataatctaatcaccaatttcggcaagtttatggatcccttggcagataaactgcttgtctgctctgcactgatctgttttgtggatatgcatcgtatgccgacatgggttgttcttattgtcattgccagagaatttattatcagcggtttccgtcttgttgctgctgaaggcggtacagtcattgcagccggtatatggggcaaatataaaacggccgtcacaatgatcacgatcattttcatgatcccgaattttggcggagcagccgttcatatgatcgagcagatcatgatttatctgtcgctggcactgaccgtgatctcattgattgattatctgatccacaacaaatctgtccttgctggcaaaatgtaaccgggcccctgcacagtggaagaggagtgatagaaactgtgaaaatagtgaaacgatttctttttatcatcagtgcattacttgtactgatgctggcaggctgttcaggaaaactcagtcacattgatatcaacacaacactgactgtggatacgaccttcaacggcagccgtgagatgacagcagatattcccgccgccgcatacaagtatgccttcggcggcagtctgacagcgcttgaagacatgatcaatcagtatacgccgggtgatatgtactgtacagccaccgagaatgaagatggcggcgttcggattcagatgatcatcgactttgcttcaaggaatgaatatcagaagaagatcgaaaccatctgcaacggcaacacaacggattcagccatcacccctgtcatcaactttgattattcgcattctattttgaaaaacggctatacaatagaagagaatttcacatctatggatctgttttactggctggcggatgccatcagcaaggaataccctgctatggaaggcaaaaacatccaggatattttccagctcggcaaaacagaagttgttttcaacggagaaacaatggaaatgcaggactatatcaagatctctaccatcaagtccaatgcctttgacaatgtttccgttgccgctcagttgtcagatgaccagtccgttgatgccagaattacctatgtcgtcagcaacaaagtcgttgccgccctcggaacccgattaaagacattgatggatggccttgtaccagacaatgcttccatgacctatcaggatggtgacagttccagaacgtacacgatctcctttgaatccgccacccttcagaattacattaccaatgtcaataaagcgctgcacaccaataataccgtctttgaagtgtccacagaaggagataccgaatccctttctgccaagaaatccatcaaacagtattatgacggcagttattttctggattttacagctgaagggacaactatgtcctatattctggatgtatctccggaatacactgttgaaagctgcagcagcacctatggttatctgaaagatgaatcatccacctacagcagcgatacctgtgaaataaccatgaccgtcgcatccgcagatgaggtgacagccgtactgggatttgccgtcgatattgatgaagtagatattacaactgacatccacagcgatacgaacatccagcgtacctttgaatttcacctttcatccgatgctgtcaatctaatcggcagcagtattgaagaccgcttaaatactgctgcggagcaatggccggaccagatgactgtcaatacagaaaatgtactgagcaatacgaactacagtattgtactttcagcagaatcggcggatgaactgaccaaaatgacccgggctgttctcggggaatctgatatatctgacgataataagagcaacagtggtgagctgacaaattctctgtttaccggcggtaccgagaagcataagaatccatggaatatccactgtacctatgaggatacgctgaatctgtccggatttctcaagggatcccagatcaaaaatggtattcactacaagttaagttattcaaaaggattcaaagctgcctttaccgagaacaatacctttgaagatgccgcagctgacggaccaacgcttacctgcagtacatttaataaagtgttatctgtcaaatctacagcagagaaaaacaatctggagggcattcttatttttgcattatggattgcttcccttatatgtattgtcgttatcttgctgctgaatattgagcatattatcaatctggtatccaacaaaaagattgacatttcaggttcagagctgttcaaaggaaaacatctgcgcagactgactgcactgattgttgcgattgtctgctttgtactaatgaccatcagactgatattccgcatctattaatcatgcactttactttattatccaaggaactaaaacctaaaaaggggctgccaaaagcagcctctttgtcatataaacttattcacttcgacggaatttccttcagaatgtctatctgaactttctattgatcgcatccacaatcacatcaacgctaccatcaatgccaaatacagaactgtcgatcataagatcatagctctcgtgttcgccccaacggtattctgaatagtactgataatatgtgcgacggatcttatctgtccgcagcacttccttgcgggccttatcttcagaatcgattaaatgcctttccatgacacgatggacacggtttctcagcggtgcataaacaaaaacattcaggacatcttctctatcttccagtacactgttggaacagcgtccaacaataacaaaggattccttctctgaaagatcacggatcacatcgctctgcgccctgtacagctgatccgcaatcgtcggtgcatatggtgaaataaaaggactcggtgccttctcatccgttgctcctaatacattcagatccaaaccactgtgtttcgctgccagctcaatcagattcttgtcgtagaatgcaataccaagcttcttcgacagcttctcaccgatttcatgaccgccgctgccgcattcacgtcctaatgtaataataatcttcttatcactcatatgtttcacctatcccctctaagtagtagataccttctttcttggtactcttattataccatatatacttcctgaaattcaaccggaacgtcgttttaataaatgagaaaatataaaacataaaaagctgccgacaaagacaagagcaaaaatcatgatggcacaatgcataaaatatccatccggcaaaatatcaataatcggatccgtggaagagtcaaataaccaataatcattattaaaaacaagctgatgaaaagtaacaaagacataatcccaattgacagcaaccatgaaaccaagaaaagccggcagagcaatacagagtattcctgcaatacgaagccagagccacgcatgcattttgataaaatagaaagctgcagcagccgtcaacagcaaagttcctacaaaaagccacccaaagaaatcaaatattttcttaacttcctcaaaatgaattctgcctgattcggacattgcacaagttggaaacttcagcggctggtgattgaacagactgttataatcaatcagcgcatcgtaattgctgcggatgtctttttcttccctgccagataattccgttatgtgcagattctgtatatctgcataataaagcggtctgaaattcaacgtcaatgtcacagaaaaagaaataatcagcagacatacaacaatgccgccgatgatctgtgagcataatgaataaaattgatgcatcagaggcacctccttccgtcatcagtataccacattatcacaaaaaagtggatcggcaccgccaaaaatacatttttcatattgtcaccggaatatggatatgttataattcgcaaaagagactgaatgtgtgcccaaagaagacatttgtaagcgggcaaaaggaggaaatatggaattattatataaaagcacccgaagtgctgataaaactgtaactgcatcctatgcaattttaaagggacttgccgaagacggcggtctttttgttccgacatcttttccgaaattggacgtatccattgatcgattagcagatatgagttaccaggaagtggcttatgaagtcatgaagcttttccttactgatttcacagaagaagaattgaaacactgcatcaacagtgcatatgatcagaagttcgatacagaagttatcgcaccgttagtcaaggctgacgacgcctattatcttgaacttttccatggaaagaccatcgctttcaaagatatggcattatccattcttccttatctgatgacaactgctgcacgcaagaacaatgtcaagaacgaaattgttattctgacagcaacatccggtgataccggcaaagccgcactgacaggttttgcggatgttcccggcacaaagattatcgtattctatccaaaggatggtgtcagccctgttcaggagaaacagatggtgacacagaagggtgataatacatttgttgtcggtattcacggcaattttgatgatgctcagacaggtgtgaagaagatgtttggctgtgaaacactgaacagggaattgaacgctgccggctatcagttctcatccgccaactccataaacatcggaagacttgttccgcagattgtttattatgtttatgcctatgcggcactggtacataatggcgagatcaaaaacggcgatccgatcaatgttgatgtcccaacaggcaacttcggcaatattcttgccgcttactatgcaaagaatatgggggttccgattgccaaactgatttgtgcatccaataccaacaaagttctttatgacttctttgccacaggtacttatgaccgcaacagagaattccacgttacaacctctccatccatggatattcttatttcaagcaaccttgaacgtctgatctatcagattgccggtcaggatgctgccaaagataatcagctgatgaagtctttatcagaaaccggtgtttatggtatcacacctgccatgcgtgagaatctcaaagatttctatggtaattatgcaacagaagaggagacagcaaaggtcatccatgatctgtatgccaaaacaggttatgtcatcgatacccatactgcagtagctgcttctgtatacaagaagtacgtgactgagacccatgatacaacaccaaccgttattgcttccactgcaagtccatttaagtttgcccgcagcgtcatgacagctatcaaaggtgatgtcagccagtattctgaatttgaattggttgatcagcttacagccgtttccaatgttgctgaacctgcagctgttacagagattcgtacagcacctgttcgccatacaaccgtatgcgataagaccgaaatggaagccacagtcaaaaaattcctgggtatctagtaaacaaatagagcttcgcattaacaggatgcgaagctcttattcatttctgaagccccttctgaaattcaatcgactctttagggttcgaagccctcaaatatcatgacatcaactttgttcttgaaccgatcataggttggtttgcctggtatcgtccagacaaccgtcataatatggaacagcttccggttatagataaccgccggattgtcaagatcaagatatttataggcaataaagtccggatgtgtaaaaaaattcgtcatcagattcgacatcaagaaaagcacgatatcacaatgaggattttccttgaagaaattgcaggataactggccacgtaccacctgcggctcatgacgtttaaaccactggaggacaaaaggatggaaggactctatacagtaatcccccttatacctggacaacagctgccagaccagcgggcaaagcagattctgattgcttccgtctaccttcaattcaataatcaacggcactttgccatctatcaactcaagaacatctttgaaaagcggaataccttcttcagtaccaagaagacgcagctgcatcagatccgaatataaaaagctcgaaatctttttattcattccgcacatccttgttaatgtatcatcatgaaagactaccagctggttatccgccgtcaaatgaacatccagttcaatgccatagcccttatccactgcccgacgaaatgccgccatggaattctccgggatgccgtgctcattgtcatataaaccgcgatgcgcataatcccatccggtaagatgttgccatttcttctttttatgaataccgggcgcacttgcaaataaataaaatcctgtcacgatgccgccgatataagccattgttcgtacaaattttttcaacataaatccattacctcttttcttaccgtctttattataacgtcaaccccttttatttgacaataggctttgacttgaatttcctcttgaaataacgaaatgaatcatgtataatacactcatgaagaaacttatctggggtgtgcgacagttcgcaattttgaatctacatttttttgactgggaaactgcgtgttccacaatatgtcaggccgcccgcaatggcagcggaagacagaaaagtggaccaggttacccacctggcttaaggctaggagtcaaaaatgcggacatcggcactttggaggtttctttttttttcgcattttccggggaatagcgttatcgatatgcatcggctttctgacctttttaccctagtattttcaaatatttatcataatccggtcttcctgaacatagattaatagtgtttgataccgcaatcaaggacaggagacccgtatgaaaagaatccaaccggtcatcctgcttctggcagcgatgactctttttttattttaccgacagagtcacagacaatcttttacagaaggtattacacgtgcccaaacggcacgcatgctggcatggaccgtatgtgacatgaataaggacagggcaaagagtgtcgaaccgcttattgatgttgacagcactttatggtatgccgatgaaatcacgacagttctggcagagggcatcctgaaaaaagacggtgatctatttcatcctattgattacctgacatgggaggaggcctcaaatattgctgatttttttgacatttcgctttcaattcctgtatttcaaaaacggaagcctatgccgcttgaaaaatggctgcaattttttgaccggttactcgcagaacaggacatagatataaaactaataaaaaaagaacaaaagattctggctgttccatctgcatctgatacattggacagatggcaggtaaaaactgacagcggcatatacagctgtgaaggacttgctctcgaaaaatatcttgaccaaaccgttactgcctatatttatcaggatcagctgttaatggccgttcctgccgatcatcagcaggcagaaatcatcacagcttctacatctgttgatacggacaacacaaaggccgcagaagccccctccgaatcattttctcagaatgacccccttcctgcagcatctgctcctgacatccgggtctgtattatgaatgatgacttctcatccgaggcacataaaaaccttcggctgacttctgatgctgcatggcaactgacttttcataacaaggtcattcaatatccggcggatgaagttgtggaactgaatatagatgatttttcggaggatggcgaaacagctgaagctgttcctgaaaatcatcactgcatgaccattctcagcattaacagaagctgcggcaatccttcctacagtggccggctgcagattatgcgttcaaaagacgcgctctttctgatcaatattcttccgacagaaacctatttaaaaggtgtcgtaccttccgaaatgccggcttcctatcatttagaagcattaaaggcacaggctgtctgtgcacgaagttatgctctgtctgctgtgaaaaaccctaaatatgattttgctgacctgaatgacagcacatcctgccaggtctatatgaatcagggaacagatactcagacagatctggctgttgatgccactgcctgcgaagttctatccagccggcagaagatcgtaaccgccaaatatttttcctcttcatgcgggagtctctcaagcagtgatgatatatggggttatccggatacagcctcacaggatacccatatgacagaacgtctggaaacagagcctccgggaatacctgcactttcctcagaagaagctttcagaaactttatctttcaaccggcagaaaatacttatcttgaatcatctgatccctggtttcgatggcaaacggagctttctatggcacacatccggtccaatattgccgaatcctttgcaaagagaatgtccgcagaccccaaacgtttcacggttttgtcttcagatggcaccattgacccggatgacatttcgcagatcaaaattgtcaaacgagccgaaagcggggtgctgcagaaaataaaactgaccggcagaaatcaggaattgactgtcagcggtgaatacaatatccgatgtctgcttgtcccgtcctcggatacagccgttattctacaggacaaaagtaccagaaacggcatgtctctgctgccaagcggatattttttccttgaagaaatcaatgatggagaacaaatcaccggctataaaatttatggcggtggcttcggccacggagccggtctaagccagaatggtgccgacacactggcagaaaagggatatgattatagagaaattctgacatactttttcgagggtatcaacatagaaaatgtcaataccctcgaatgaagcatcaaaggaacctgcagacaggttccgatgaatgccctaatatttaaaaatgtcttctgctgtgtcccctgaaatggattcgggatgcagcagattgttgagttctgcccccaggaaaagctgatacatacaggtgtacagccagagcatgatcatcatgatgcccgccagactgccgtacatatagataaaactatgggaataattgaaataaatagcaaaaatgctggaagtgatcatccatccgatggagcaggatattgctcccggcagcacatacagcagcggtgtcttcttattcggaagcaccttgtaaacaaagatgaaaaacatcgtcagcagtccgaaaatgatcaacatacggatactgatgacaaaggcagcaaaatcatgcagcaccggcagaagtttgatcaccttgcgataaaaaacattgccaaataccagaagaccgagggtcacgattaatgctacagccagccacaatgtataaactgctgaaatgaaacggatataaaaataatttcgtgtttcattgatatgataaatctcgttaattcccctggtaatagacaaaatccctcgtcctgccgaccagagaacaaagatgatcgtaaacgatgtaatcgcaatcgtagactgctcataaacttccttcataaccaagcgaatgacatcattggccatcttcggcgataacatctggagaatattcaacagatcttcataggtcaacggtgaataccgcagaagagtcagcaaaaaaatacagaatggaaatgcagagagcacaataaaaaaggccgcctgtgaagcataagctcccagatgatcttctgtatttttcttcaaaaatcccttgacccaacgcaaaattgaatgcatagattcccccctcgttaaaacgtcacatggcttcatcttatcatagattacaaaaattaacaactgtgaagatgacctattgacaagctttttgaatatgttaaaataaaacatgaacaaaagctgtgaatgtgctgcagatcatgtatagtatatgcatatctgtatcaggttatcatttccttacagagagaggaagccattggctgaaagctgcctcaagttctgatgatgactgaatttcccacaggagctgtatctctgaaccatataccaagtaggagatatcgccgatgcccgttaagcatctccaagtgccccgttatatgtcatttttgaataacttcgatttgaacggggaagcagggtggtaccgcggaatgaattcgtccctttatttttcataaaggggctttttttatgcacttttgcgcgcgaatacatacctgcctgcaaaccacatccacagtcaaaataagattagtcaaagaaaggagcgtatgattttttcatacgagtcgtacaatgaaggacagactgcaaaaaattagaaatgaagccatcgcccagatcaaagctgccggtggtatggatgcactgaatgatatccgtgtttcctttttaggtaaaaaaggcgaactgacagccattatgaaatccatgagagatatcccgcctgaagaacgtccggcattcggccagatggtcaatgaagcccgtcaggaaatcgagaattctcttgatacgatgaagaaagatcttgctgcaaaagccagagaacttcagctcaaatccgaagtcatcgatgttacacttccggcaaagaagaaccatctgggtcaccgccacccaaacagcattgcccaggaagaagttgaacgtatctttacaggtatgggttatgaagttgtagaaggacctgagattgagtttgactactacaactttgaagctttgaacattcctgccaatcatcctgccaaagatgaacaggatacattctacatcaccaaagatctgctgcttcgtacacagacatccggtacacagatccataccatggaaactcagccgctgccgatccgtatgatcgcaccgggccgtgtattccgtgccgatgaactggatgctacgcattcaccgaacttccaccagattgaaggccttgtcgttgacaagaatgtcacatttgccgatctgaaaggcacactggctgaatttgcgaaacagcttttcggcgaagatacaaaggtcaagttcagaccgcatcatttcccattcacagaaccaagtgccgaaatggatgtcacatgcttcaaatgcggtggcaaaggctgcagaatgtgtaaaggtgaaggctggattgaaatccttggctgcggtatggtgcatccgcatgtatttgaaatgtgcggcattgatcctgaagaatatcagggctttgcattcggtgtcggccttgagcgtatcgccatgctcaaatacgaaattgatgacatgcatcatctctatgaaaatgacatcagatttctgaaacagttctaagcagcaggaggaaaatagattatgagaacatcattaaaatggattaaagaccttgtaccgggtattgaggatctgacacctcaggaatatctggatgctatgacattatccggttcaaagggcgaatattatgtcgaattagacaagaatctcgagaatattgttatcggacagattttaaaaatcgaaaagcatcctgatgccgacaaactggtcatctgccaggtgaatgttggtcaggaagaacctgtacagatcgtcacaggtgcaccaaacgtttttgaaggcgctgttgttccggttgtccttgcaggcggaaaagttgccggcggtcatgacggcagcacccctccggaagagggcatcaagatcaaaaagggcaaactccgcggtgtaccaagtaacggtatgatgtgttccatcgaagaactgggttccagccgcgatatgtatccggatgcccctgaaaacggtatctatatctttaagaacagagacgatatcaaaccgggagatgacgcaatcaaggctctgggcttagatgacgctgttattgaatatgagatcacatccaaccgtgtagactgcttcagtattctcggtattgcaagagaagctgctgttacattcggcaaaccattctgtccgccggttgtagaaccaacaggcaacgatgaggatgtcaacgattttatcagcgttgaagtcaatgacaccgaactgtgcccgcgctacacagcccgtgtggttaagaatatcaaggtcggaccatctcctgaatggatgcagcgtcgtctggctgctcagggcatccgtccgatcaacaatatcgtcgatattaccaactatgtcatggaagaatacggtcagccgatgcatgcctatgacctttctaccatcgcaggccagaagatcattgtccgccgtgccgaagacaacgagaaatttgttactctggatggccaggagagaacactggacagctctatgctgatgatttgtgatgcagagaaaccagttggtatcgcaggtatcatgggcggcgaaaattccatgatcacagatgacgtagatgctattttatttgaagcagcctgctttgacggcaccaatatccgtctctccggcaagaaactcggtatgcgtaccgatgcccagagcaaattcgaaaagggtctggatccgaataatgccagtgcagccatcgaccgtgcctgccagttgatcgaagtgctgggctgcggcgaagttgtcggcggtatggtagacgtttacggcaaagtcaaagagcctcatgaaattcctttccagcctgagagaattaaccgtctacttggtactgatttatctgctgaacagatgcttgattacttcaagtcactggaacttgaatacgatgctgacagaaatgtcatgattatcccgacattcagacaggatcttctgggcacagcagaccttgctgaggaagttgcaagattctatggctactccaatattccttctacactgccaagcggcgaatctaccagcggtaaagtttccttcaagcacagagtcgaagatgttgccaaggaaactgctgaattctgcggattctccgaaggtatgactttctcctttgaaagcccgaaggtatttgacaaactccgccttgatgctgatgatccgctgcgtcaggcaatcactattgccaacccacagggtgaagattacagtatcatgaaaacaacacctttaaacggcatgcttgtttctctggcaagaaacttcaaccgccgcaacaaagatgtaaaattatacgaaatggcaaagatttatctgcctaaatcactgccactgacagaatacgctgatgaacgtgttcagtttacactcggtttctacggcgaaggcgatttcttcacaatgaaaggtgttgtggaggaatttcttgaaagagcaggtatgcatgatatcgttgattatgatccaaatgccggcaaaaactttctgcatccgggtcgccaggccaacatcatttaccagggtaaagtcatcggctacatgggtgaagttcatccggaagtatgcgaaaactatgacatgaagacacgtgcttacattgccgttcttgatatgcctttcattacagaaatggcaacatttgaccgtcatttcaaaggcattgccaaacatcctgctgtaaaccgtgatatcagtatggtggttaagaaagacatccttgttggtcagattgaaaaagtcatccgcgaaaagggcggtcatcatcttgaaagctaccatctgtttgatatctacgaaggttcacagatcaaagcgggttacaagtccgttgcttactccatcactttcagagcaaacgacagaacactggaagaaaaagatatcacagcagctatggacaagattattgccggccttgaagaccttggcatcgaactgagaaaatagaggctgacagacaatgaaaacaagtgatttttattacgatcttcctgaagaactgatcgctcaggatccgttagaagaccggtcaagctccagactcatggtgcttgaccgcgaaagcggtaatatcagccatcatatcttcaaggatattattgattatttaaaccctgaagactgtcttgttatcaatgatacaaaggtcattccggcaagactctatggtgtgaaagaggataccggtgcccacattgaaattctcttattgaagagaagagaaaatgatgtctgggagacactggttcgtccaggcaaaaaagcaaaaccgggtacccgcctgacatttggtgacggacgtctgaaagcagaagtcattgatgtggtggaagagggcaaccgtctgatccattttgaatacgaaggtatttttgaagaaatccttgaccagttaggtgaaatgccgctgccgccatatatcacccacaagcttcaggacaaaaaccgttaccagacggtctatgccaaacatgaaggcagtgccgctgcacccacagccggactgcattttacaccggaacttctggcggccattgaagccaaaggcatccgcatcgcccgtgtgacccttcatgtgggcttgggcacattccgtcctgttaaggtggaggatgtgacacagcaccatatgcattctgagtattatcaggtcactcaggaagccgctgatatcatcaatgatacaaaaaaacgcggtggcagagtcatcgccgttggtaccaccagcacacgtacgctggaatccgtggcggatgaagacggcaccatgcatgctgcaggaggatggacggaaattttcatctatccgggctacaaattcaaatgcattgatgcgctcattaccaatttccaccttccggaatcaacacttctaatgctcgtctctgcactggcaggcaaagaacatattatgcatgcctacgagacagctgttcaggagcgttatcgtttcttcagcttcggggatgcgatgtttataaaataatctgtaactattcaagtgcattacactgcatgtcctatgcaggtaatgcactttttatttccgattcccggataaaaccgaaaattcatagacaacccgtatcataaagtgttataatggagcggtatgatgccatagagataacatggtatcaggatattatttcatatactacaaaaaggaaaggattatatatggacgtagacagggaacagcttcagaaactcagagaacagattggcagaaaggcacatctgacatccatgcttgacaatctgtatgttcaggaaaaagagcagaaggaaaaggttgaagaactgcgacaggagaaggaagatgagcagaaggatgtggaccggctggaagacagaggcctgacagctcttttttacagtctcatcggaaaaatcgacgagaagatgacaaaggaacagaaggaagcttatgcagcctccgtgaagtacgaagccgcgaatcaggaattaaaggccattcagtatcatatccatacatatgtcaaggaactggattatctgaagggatgcgaagcaacctacaataaattgttgaaggcaagagaggacgagattcgtctcaggaattcagacaaagcggacagattgctccatctcgatgaacagatatctgcctgcagcagccgtatcaaagaacttcaggaagctatttcagcaggacagaaagccgcttttacaacagattgtgtacttagcaagcttgataatgcagaagcatggggcacatgggatatcctcggcggcggtttactcagcacagcagccaaacacggcaacctggacgatgcccagagctatattaccgaactccagatggatctcagacacttcaacacagaattgactgatatctccgttcagacggatgttcatgtcaacacagatgatttcctgcgttttgcagattacttttttgatggcatctttgcagatctggctgttcaaaagcgtatcaagcaatccaaagaacaggttcaagggattaaaaccgagattgagtccgttctcgaagaactggaacgcatactggatgaggaacagcacctgaaagagacacttcaatcagagattgaagacgtccttgtagaataatcaacatacaccatgccgatgacgggatttgactgtcatcggcatttttttgccaagattacataaattttacatcaattacatccaaaaaagatagttcccgcatgtattttccattatgatggataagaaataaaattcaatttatcatacatacaggagctatcacaaaatgagtaaaaatacaaaagaatgctatgagaacagagaattatcctggctgaagttcaatgaacgcgttctggaagaagccgctgacaaaaacaatcctttatgtgaacggctgacttttctttccatttaccagtccaatcttgacgaattctttatggtgcgcgtcggctctctgatcgatcagaagctgctggacgaagatgtccgggaaaataaaacctacatgaccgcagaagaacagattgatgcggtgctcagacaggttacgcgtatgatgcgcagcacaaatcacatctatgatgatctgatggatgaactggagagacagcaaatccgactgattaatttccagatgacaacagaagccgaagagaaagatctgcagctttactttgaacatgaaatgctgccgcttttgtccgcctttgtcgtcggcaaaaaacaatctttcccatttctgaataataaagccatctatgcccttgctgtccttgaaaccaaaaacgacaagaacaaaatcggcatcgttccatgcaatacaggcgtctttaacagactcatcagtatccccggaagaaaaggaacctacatactggcagaagaactgattcttcattaccttcccaaagtattcccgaattaccggatcggcgaaaaatctttgatccgtatcaccagaaacgccgatatcgatgtagacagcatctatgatgaagatctggattatcgtgaacacatggtggatatcattaagcggagaaagaaactgacccctgtccgtctggaatatacacgcaaaattgacgggcccatccttgacagactctgtacacagctcggcattgagcgcaaacagactttctactgtcagattccaatggatatgtcatttttcagcgtcatccaggacacgctccgtcataagccggatctgttttatccaaaacgtgtttcgcagaaaagtccgatgctggacgaatcccaaccgctgataccgcagatcataaaacatgatgtcctgctttctttcccatacgaacagattcgtccattcttaaatatgcttcatgaggctgccagtgatccggatgtcgtttctattaaaatgaccctttatcggctggcccgtcacagcaaggtcgtggaagcgctgatcgaagcagctgaaaacggcaaacaggtggatgttcttgttgaattgaaggctcgttttgatgaagaaaataatattgaatggtccagacagttagaagacgccggctgccatgtcatctatggtcttgacggactcaaggtacactcaaaactctgtctgatcacacgaaagacagaaaaaggcattgattatatcacccagattggaacaggtaattataatgaaaaaacagcccgtctctatacggatctctctctgatcacagccagacctgaaatcggtatggaggcctcacgaatctttcaggctttatccctgggcacggttgttgacaagactaaacatctccttgtggctcctaaatgtctccagaaacccgtactggaaatgatcgacaatgaaattgccatggtaaaatccggtcaggaaggttatatcggcatcaagattaattccctgacagataaaaaaatcattgcgaaactgatagaagcatctgaagctggtgtaaaaattgacatggtgatccgcggcatctgctgtctgcggtccggcattgaagatcttacagacaatatccggatcatcagcattgtgggacgttttcttgagcattcaagaatctatattttcgggacagagacgcgcgcccggatttatattgcctccgctgattttatgacccgaaataccacacggcgtgtggaagtggcagttcccattgaagacgtggatctaagagcccgcatacaggaaatgttcatcacgatgctaagcgacaatgtcaaagcaagagagcaacagccggacggcacctatgtctgtttgacaccggaagagaacgctcccctcaattcccaggaatatttctttgatgccgcttatgctgcagcggaaaataataatttcagataatatcctgcacataaatgatttgacaaaacaggactcatcttttataatttgataaggtgtgtcctgtttctttttcagaggcagaatacagaaattgtcattaaattttataaaataaaggataaggtgaataacatgagtttaatggaagattgggaagtacttgcaaaccagtacaatacagatcaggcaacagcacagaagttctggacagattactatatgcaggagaaggctgtctatgaaaagatgctgacagaacctgtagaagttgagaagggcactgttgcagagctggctgagaaatacggtatggatgttgtccgtttcggcggtttccttgatggtatcaatgaaagcttaaagacaccaaaccctgttgataccatcgttgctgaatcagaagtgactgttgatatcgaccttgagaaactgtactacaacatggtagctgcaaaggctgattggctttacaacctgcctcaatgggatgcacttctgacagaagaacgcagaaaagagctctacaaagcccagaagaaatctatgactgttgttaaaggcaagaagatcggacgtaatgatccatgcccatgcggaagcggcaagaagtacaaacagtgctgtggacgttaatcactgcttaagtctgaacagaggtttttatgagtatcttaaatgttgaacatttatcccacggattcggagacagagccatctttcaggatgtctctttccggatgctggcgggagaacatattggacttatcggcgccaacggtgaaggtaagtccacttttatgagtattattacaggcacactgatgcctgacgaaggcaaaatcgaatgggccaaaaacgtccgtgtcggttatcttgaccagcataccgtgcttgagaaaggcatgactgtacgtgaagtactgacatccgcttttgactttctctttgaaatggaagagaagatgaatcacatctgcgacaacatgggcgaaatgtccccggatgagatggatacagccatggaggaactcggcaccattcaggatcttctcatgatgcatgatttttacatgattgacagcaaggtggatgaagtagcccgagctcttggtctgacagacattggccttgacagggatgtcactgatctaagcggcggccagcgtaccaaagtcctgctggccaagcttctccttgaaaaaccggacatcctgcttttggatgagcctaccaactatctggatgtcgtccatattgaatggctgaaacgttacctgaatgactatgagaatgctttcattcttatttcccacgatattccatttctgaactccgtggtcaatttgatttatcatatggagaatcagcgtctggatcgttatgtgggaaattacgaccagttccaggaagtctatgccatgaagaaagcacagctggaagcagcttacaacaagcagcagaaggagatcgcccagctgaaagattttgtagccagaaataaagcacgcgttgctacccgcaatatggcgatgtccagacagaagaaacttgacaaaatggatgtgatcgaacttgcctccgagaagccaaagcctgaattcaattttaagctttcccgcacaccaagccgttacattttccagacaaaggatctggttatcggctataatgagccactatctacaccattgaatcttgaaatggaacgcgggcagaagatcgtccttaccggtgccaacggtatcggcaagacaacgctgcttaaaagtattctcggcctgattccttccatcagcggcacggtagaacagggagattatctgaacattggttattttgagcaggagatgaccggtgacggcacaaaaacctgcattgaaacactctgggatgaatttccatccttcagtcagtatgaagtacggtcagcactggccaaatgcggtctgacaaccaagcacatcgaaagccaggtgcgtgtcttaagcggcggcgagcaggcaaaggtccgtctctgcaagctgatcaacagagagaccaatgttcttctccttgatgagcctaccaaccatctggatacagatgccaaagatgagttgaagcgtgcattgatagattataacggcagcatcctgatggtctgccacgaaccagacttttatgacggtctcgctacagatgtctgggattgcacccgttggacaactaaaatattctaaaaatacgacattttaatccttttgtagcttctttttgaacatttgcctttttgtgaatctgtactttcagctcattttcttttatagtactaattgctagcagacatgctaaagtatacagaaaataaataaatgggctggaggtccggtatgagtcttatagagatacttatcatttccatcggattgtctttagatgtctacgctgttgttgtgtgtcagggagccgttcttttaaagattgaaaagacaaagcttctgaaaatgagtctgtttttttgtgcctggcaagtggttgccgtttccatcggtcatacggtcacattaattccttatctgacagacatcgccaaaaatgtcagctatgtaggtgaatttatttcagtcatcatttttacggttattggcgtatacatgttatacaaagcctggaaaaatgaaggcattctcgaacgactgagcgatgttaattacaaacagctctgtgttgctgcattcttcaccagtcttgacgcactttttgccggtatgggatttggcctcttaaaggcgaggttctatattgtagctctgagtatactgatcattacagccgttatggttatactcgggctgtacaccggcatgcggcttggatatgagcaaaagacaaaggcatacggcattggcggtattttgctgttgatttctgccatagatgtcgtattaaaatatttagcataaatcaggaggattgaaatatgaatacaacattagacaaaatttcacataaagcgcagcgtgcagctgccagtgttatcatcgacaaagtccttgcgatggtagacaaagacagagaaaaaggatttcttgaattagtagactgggcagaacagttctggggcaatggattttccaaagaagattacgataaggttagaacagctatcaaagatcctgataacagatggattaaattcatcaatcgcgtattggatgaaacagatcctcatgttgccaaaatggctgcattgaatcttggttttgaagctttcttccgcggcacaaagatgatccgtaagaaccgtgaaatctaccactgcaatattccgtggctgattctctttgacccgacatccgcctgcaatatgcattgtcagggatgctggtccggtacatatggtcacaaggctaatctgagcttcgatgatatggataagatcatcacagaaggcaaagaacttggcgtttatctgtatatgatgacaggcggtgaaccgcttgtacgtaaggccgacattcttcgtcttgcagagaagcataacgatgttgagctttcaatctacacaaactctacattgatcgatgaagatttctgtaaggaagtggttcgtctcggcaatattactttccagctttccatcgaaggtacacctgagacaaatgatgcccgccgtggtgacggtcattatgcagctgtcatgaaagccatggatctgctgaagaaatacggtatcattttcggtacatccatctgctacacacgtgccaatattgaggcagttacaagtgatgaattcttaagaatgatctccgaaaaaggagcacgttttggattctatttccactacatgccagtgggcaacaatgcagttcttgacctgatgcctacaatggaacagcgtgaatacatgatcaaacgtatccgtgagatccgttctccacagtgtgatatcggatttttcccaatggatttccagaatgacggcgaatatgtcggcggatgtattgcaggcggacgtaactacttccacattaactctgcaggtgatgcagaaccttgtgtattcatccacttctccaatacaaacattcatgagaactccattcttgagattctccagagcccattgtttatggcttatcataacggtcagccattcaacaacaaccatctgcgtccatgcccgatgcttgaaaatccggaattccttcagaagatggttcatgaaacaggtgctcaccagacaaatatggaatctcctgaaaccgttgaacatctctgcagtaaatgcaagaattacgctgaagaatggaagggtcatgccgataagatctgggctgaagaaacccacaaaacaccacagtacacaaattacaaaaaataattactctttagaggggactgccgaggcagttccctttttattgtctgcaatccatctgtttcaaacatcacatattaatttgcatgttaatattctgaaatcaatgatttctattactagaatatgtaaattatatttgcaattttttctttttgtgttatactttctaatattgttgcaattgagcatgcagcctggagggaaattttgaatggaaagaaaaaagatgaccaaggcgctgatcggcgaaagtctgaaagtacttatgcgcaatcatccctttgagaaaatcacaatcaagatgatcacagacgaagccggcgtcatcagaccgactttttataattatttctgcgacaaatacgaagtcgttgaatggatttttaatgaatatattatagaaaaagttcgcgcaatgtttgagcagaagatgtatacagaaggtttaaaactgttatttgtatgtatgaagaacgattgtgctttttacaggaaagcctttgagattacaggtcagaatgccttcacagacattatcaggaattctctgcataatcttttcctgtcagagatgagcgaaatctatatagagaaccagacgaacaatcctttagtgacggctgaacttgttgctgctttttatgccaactcattatccaaccttcttcagatgtggattcaaagcaataatcaacaatgtaccgccgagaatatggtagaagcctatgcctatctcctgagtcacagaatacaggattttattgatccaacagaaaaccctgctgaaaattagtttttcagcagggttttcttatgctgcagaatccagaactttttctgtctatcgtgtatggataatataggaatatttggacagcagtgctgttgctttctccacggcatcctgttcatagaattctatacgcaaaacaccttcctggaattcccggttatggagaatgccgatgtttttaatactgatacgattggaagccagtatagttgcaatcgttgcgatcgcaccagattcatcgatcagatccacatatatctcataggccggctcaatactgcctttcatcttcatcggcatactgtcgcggtaatccttggcctcttcaaagaaacaatgcagtttgtctccccgattctctctgatagcctctgatatatcttccaatgaagccttataggcatcaatcaccttcaaaagctgcccctggttctcaagacaaatggattcccacatatccggggacgatgaggcgatacgggtgatatccttgaaaccgcctgctgccagctgacgcatcagcccctccctgctatcagatgttcggacaagattcaccagtgtgtaggcaataacatggggaagatgactgatcgcagccgttgcataatcatgctcctcacaattcagtacgattggaactgcacctgtatctgttacaagctgacgcatttccgccaccttgtcaggattggaaagggcagtaggtgttataatatagtaagcattctctagcagccggtctgttgcacttgtatagcctgtcttctctgatccggccatgggatgcccgccgataaaacgcgcctccattcccagttctctgaccgcctcatgaattgtggatttaacgctgcccacatctgtaatcacacaggtatccggcacaagatcctttaacttcttcaggcactggatattcacagaaaccggcatgcacagaaaaataaaatcacactctgcaaatgaagcatcgatcacatccgttgcctgattgatcgtcccatcagacatcgcctccacaagactgcttctggagcgattgtatgcaattaatctatattcaggatgtacacgacgaagggccttggcaatggaaccgccaataagcccgagaccgataaacccgattgttttgtcagacataatatttccccttttgtatgataaaattaagttaagcttttatcagtctaacacttacctatataaaagtcaatgatttatgactttaaagcggtaaattttatctgtctagttcaaatatttcgactatcagaaaataattttcagaatttattgttaaatatcgataaaatacttgaaaaatcatcatctttttagtagaatatagacatgggttttcttcaatagatcatgtattcaccagaagtttaacctatgtatcaaatcgtattggaggactggacatgaaggtttataagacacaggatattcgtaacgtagcagttctgggacacggcggctgcggaaagacaacacttgttgaagcaatggcgaatgtaacaggtgttacatcacgtatgggcaaagtggttgatggcaatactatcagcgattatgataaagaagagatcaagagaaagttttcaatcagcacatccatcgttccaattgaatggcgattctggaagatcaatcttcttgatacgccgggttatctcgattttgttggtgaagttgaagaagcattatccgttgcagacggcgcgatcatcgttatttccggtaaagctggtgtagaagcaggcacagaacgtgcatgggaattctgtgagaagtatgatattccaagagtattctttataacagatattgatgatgacaatgcagattatgcgaagatcgtagaagaccttcgtgcattatacggcaagaagatcgctcctttccatctgcctgtcaaggaagacggaaagttcaccggctatgtgaatgttgttaagatgctgggacgcaaatgcacagacgatggcaataagttcgaagacattgcgatagaagatatgcatctgtctgatgcacttcaggcagaattagaaccttgccgtgaagcactccttgaggcggttgctgagacaagtgaagaattcatggatcgctatttcgaaggcggcgaattcacaattgatgagattatcgatgccctcagacagaatgtcaatgacggcaatgttgttccggttcagtgcggttccggcctttacaatatcagcattgagaatctcgtaaagacatgtgttgaattccttccgtcaccaatccgtgatacagtcaagatttttggtaaagatcctagaactgacaaggaatacaatgtggattatgactccagacgtccattctcggcctatgtatttaagaccatcgtagatcctttcatcggtcgttactcattaattaaggtatgctccggtgaattgaaagcggattccgtgatttataactatgaacgtgaaacagaagagaagatgaaccgtctctatgttcttcgaggcaaagaagccattgaagtacctgaactcaaagccggcgatatcggtgccatcgccaaactgaccaacaccgaaaccggcgataccctttcactgaagagcgatccgcttgtttttgataagtttgaactcagtgccccttatacatacaaacgttatgcagccaagaacaaagccgatgttgataagatttcccaggcactgcagaagatgatggaagaagactgtacattgaagacttttaatgacaaggaaaaccgtcagctcctgatgtacggtatgggtgatcagcatctggatgttgttgtcagcaaattggcagccaagtacaaagtggagattaccctctccaaaccgcgtgtaccatatcgcgagacgatccgcaagaaagtggaagttcgtgagaaatacaagaaacagtccggcggtcacggccaatatggtgatgttgctatggaatttgagccatccggcgatcttgagaccccttatgtattcgcagaacgcgttgtcggcggtgctgtaccgaagaattacttccctgcagttgagaagggtattcaggaatccattggtaaaggccctatggccggttatccggttgtcggtgtgaaagccacattatttgatggttcctatcatccggttgactcctcagaaatggccttcaagacagctgcaagacaggccttcaagtctgccttcatgaaagcaacaccggttcttcttgaaccaatcgcttcattgagcgttgttgttcctgacagttacacaggtgatattatgggagatctgaacaaacgaagaggccgtgtccttggtatgaaccctgtcggcaatggcaagacagaagttgttgcagatattccattatccgaattatacggctactccaccaatcttcgttctatgacaggcggcagaggtgtttattcttacatgtttgaccgctatgaacaggcaccatcagatgttcaggaacgtgtcattgcagagaatgccaacgaagcagaagagtaatcatttaatttgatatcagacattttcggaaaggcagtccacatatctgggctgcttttcttatatgatcaaattttttatttctttctatgacaactaaatgcattgtatgccggaatgggcagctacttgtaatgttacccaacatatgttacaattatttggattgttcgactcagacaatcaacaaaaagggaggttgtttctcatatgaaaccatttgaaatacacagtgatcacgatcccgaaacatggctccgcctatgggacagcaaaattgtagaatttacttctaagaacaagggtgcctacagcggtgagcgatgctttttcggtacgcatgagaagaatcagctgatggtctttttccacagcgattatgataccgtctatctgtcaacacgttttatgggaactattgaaccggatggtacaggcagtaagatcagcggcgtcatcggtaagatgaaatccgccattttctttctctggtttatggttgcagcaatgggtatcggcggcatcgtcatgttgtcgcagcatttatggcagcaggcaattttgctctttgcactggccattattgctttcttctgcgcgaagatcacaccgaaggactctattgtacgactggagaagcttttgaaccttatctccacacttccggctgaaactcttcagccagagaacaccgatctgtcttccgaagaagcagagaacacagccagtgaaactgaatagttaccattgactttcaattacattatgatagaattaaaaatagtttaactattatgggatattttccctttaaggaggaacatacaaagcgttatgaagtacgatttcgcgaaaattgaatcaaaatggcagaagaaatgggccgatgctgacctctttgctgccaaagacaacagtgacaagccgaagttctacggacttgtagaatttccttaccctagtggtgccggcatgcatgtcggccatatcaaggcttattcaggtcttgaagttgtatcccgtaagcgtcgtatgcagggatataatgttcttttcccaatcggtttcgatgcattcggccttccggcagagaactacgccatcaagactaatacacatccaagaattgttaccgatcagaacattgaacgtttttccaatcagatgaagcgtatgggcttctcctttgactgggatcgtgttattgatacaacccaggaagactactacaagtggacacagtggattttcctgaagctttttgaaaaaggtctcgcttaccgagacaagactctggttaactactgtccatcctgtaaagttgtcctttccaatgaagacagccagggcggcaaatgtgatatctgccacagtgatgttatccagaaatctaaggaagtatggtatcttcgtattacgaaatatgcagacaaactgcttgaaggcttgaacgaagtcgattaccctgacaatatcaaacagcaacagcagcactggatcggcaagtccacaggtgcatttgtgaacttcaagctggataatgaacaggagagtctccgcgtttatacaacacgcccggatacacttttcggagtgacatttatggttatcgcaccggaacaccctctgatcgacaagtatgctgatcagatcaggaatatggatcagattgaagcttaccgtgaagaatgcgcgaagaagagcgaatttgaacgtatcgagattaataaagacaaaaccggggtcaagattgacggccttatggcagttaaccctgtcagcggcaagaaagtgccgttattcattgcagattatgttatgatgggttatggtacaggtgctatcatggctgttcctgcccatgaccagcgtgactatgatttcgccaagaaatttggtgaagagatcatccctgttatcaaaggcggcgatattgacacagaagcatataccggcgatggtgagatgatcaactctgatttcttaaatggctataccaacaagaaggattctattgagaagatgatcgaagtccttgaagaaaagggcatcggcgagaagggtgttcagtacaagatgaaagactgggccttcaaccgtcagagatactggggtgaaccgattccgattgttcactgtccaaaatgcggtatggtagttgtaccatacgaagagttaccgcttcgtctgccgaaggtagagcatttccagcctggtgaagacggtgaatctccactggccaagattgacagttttgtgaactgcaagtgtccgaagtgcggcggggatgccaaacgtgagacagatacaatgcctcagtgggccggttcttcatggtatttcctgcgttatatcgatcctcacaacacagaagcactggcagatccgaagaagctgaaatactggatgcctgttgactggtacaacggcggtatggaacatgttacaagacatatgatctattcccgtttctggcatcgtttcctgtatgatatcggtgttgtcaacacacctgaaccatacgcaaaacgttccgcacagggtctgattctcggacctgacggtaccaagatgagcaaatccaaaggcaacgttgtagatcctctggatgttgcagacaaatacggtgcagatacactccgtacttacatcctcttcatgggtgattacggcgcctctacaccttggaacgagaactctgtccgcggctgcaagcgtttccttgaccgtgtttatcgtatctttgagaaggttacggacgagaatctccacagccttgacaatccgctccacaaggccatcaagaaggtcagcgacgacattgaagatatgaagtacaacacagccatcgctacactgatggcactgctgaacgatttcgaatctgcgacgacggttggcaaagagcagtatgtcacattcctgaagctgctttcaccattcgcaccgcatatcacagaggaactctgggagatgcttggcggcgaaggtttcctgtccgtttccgaatggccggtttatgatgaatccaagatggtagacgaaacagtcgaaatcggtgttcaggtcaacggtaagccaaaggatgcagttgaactctcattagatgatgatgaagaaacagccgtagccaaagccatggcactgcctaagattgccaacatcaccgcaggcaagaacattgtcaaagttatctataaaccaggcaagattctgaacctgatcgtgaaataaacaaccgctagtgtagttctaatatataggacttaaaataagcgtctaaattgtattgcttattttaagtcctattttcttgtcgatcgaactatttcaaaatctttcgagctgcaccagccttttaaagccacgtcggcaggttcatcagactccgcagcttattgaattgcttcatttcctcctcagacatatcttttttcattacatcaaagatcaattttatctcatcattggtaaacgcaagccccatggctgtcagatgtttattcgcctcaataatagatggaatcatttctgaaaaacttttcccctcagactgatttatcagcgccataagcactgataattttcggatatcaatttttctgacggccggatgactggcccaatctactcgtgtcatactgctgcctcctttatgtattctgctgtccattcatatgacggatcagctggatctgctctggtgtgagcattgactgcattttcctgagataatcagtgtcgctggcagagcaggtattgccatccctattcgttgactcaccgctgtctgcgcctgacgcggatgccatcatagatgccatggctgaaagatccccggatccggaaaaatttctgtacatctcatacatttttgccatattcatcatattcagacaacggtccagctgctctttttcctttgccccgcaatactttctcaaatcccggataacttcttccggcggaattgcgcggttgttcacaccgcaggcactgacacctccctgatctaaatactgcatcatatgccgcagttctatggattttgccataaccgccatcattctcccaatggatggattgacataggccattgccgctttcaatatctgggctgttgaatcataggcagctgtatctgcttctgtcaaaggaattttttctgtatctatcacagaccactcccaggcaaatgaattctttatattctatgatcacttcatctgaaatatgcctactgtacagatatgtctgacagaaaacccttcccaatcatatattgtattagaacagaaaaaggagtatgatatcagatggacaaacaaaaatccgtatccgggtatccttttcacaatgaggaaacgtctatgcatccgcattccaaaattatccgacaggacagcgaaactttcattgttgaagatgagaacacgatttacgaaatagataaacactgcgccgccaggcacggatatctgccgcagcaaaggagctgaggcatatttccacacctgcataaaaagatcattggttatacaaaagaggccccaaaagggccccttgaaacaggtcatccggctttaatttttagttattgcagcagcagcagagaagaatcagaatccagatccagttattattgccgcatccgcagctgtcattaccgcagcctccgcagccacagccattgctgccgttgcagcagcaaagaagaatcaggatccagatccagttattgccgcctccgcagccatttccgttattatttgttaacccgttgcagccgcagtcattgcagcatcctgttgcagctaaatcactcatgattttagcctccacatccatgtttgatatatcttatggggcaaagattgtccccgttcctaaggagtacataaaatgtttgaaataacccgtttaaaaatgattgacatcatccatcagtgcatggatgaacagatccgtcccggtgataccgtctgcgactgcaccatgggcaacggacatgataccgcgtatatgtgccgtcttaccggagatacaggcactgtttacagcttcgacattcagccggaagcactttcacgaacagaggcgcttctggcagaagaacacctgctgactccggcccacctgatccttgattcccacagccatttaaaacagtatattgatcatccaatccgattttttgtctttaatctcggttacctgccggatggtgatcccaccgttataacaaaaggtacctcgacactggaagcaattgaagctgcactttccataacggagacaggtggcggcggtgctgttttatcttattacggccatcccggcggtgcagaagagaaagcggctgtagaagaatttctccacaatctgcctccaaaatacttttccgtcatgaaaattgattcttttaatcgaaaaaacacgcctcctgttttatatttgattaaaaagctgaaagacaataggaaaatttaatagaatacttattttatttcgacatgttttttattccttctgtgatagaataggtttaccgcaaaatccatggatgaggtgacttcaatcaaaggacaacaacagaaagaatgaagatgagggaggaaacgcaatgattattgacagtcaaatgacagaactgggctattcattgaaatcatatcgtgtcagaaataatattacacagcaggagctggcagatcgtctcggcgtaagtaccaatacaatccatttatgggaaacaaaagtatgcaaaccgtcaatgggatcactgctgattctatctgatatgctaaatgaaccactgataaacatcatagaaaaggcgaatcgtagttattattgaacagaattgaaaaatttttcacaaagtaggtgaattttcagatttgttatgataaaatagctctgaagatatttagtcgcagtattggaaagactaatacagggagggaactgacaaatgaagaaacctgtacttgtaattatggcagccggcatgggcagccgttatggcgggttgaaacagattgaccccatcgattccgatggacatatcatcattgatttttccatttatgatgctgtccgcgcaggcttcgaaaaggtgatctttattattaaacgagaaaacgaacagattttccgtaagaccatcggcaaaagagcagagggacttatggaagttgcttatgtttttcaggaacttgagaatattcctgatggatttacggtgcctgaaggccgcataaaaccatggggaaccgggcatgctgttctcagctgcatcgatatcctgaatggcccgtttgccgttattaacgcagacgactattatggtccggaagccttcaagatgatctatgattatctgacaacccatgaagatgacagccgctacagatacactatggtcggctatcgacttggcaatacattaacggagaacggacatgtttcccgtggtgtctgcaccgttgattcaaagggttatctgactggcatctgtgagcgcacctatatcgttatgacaccggatggtgctgcctattccgaggatgacggacagacactgattccgatttcaccggatgaacgcgtatcgatgaatatgtggggcttttctgccagcttcatggcagagcttaaaaaacagttttcagatttcctcaccaatgaaatgccgaagaatccgcttaaggcagaatacttcctgccatccgttgtaagcagcctccttgctgacaataaagcaacggtgcaggttctgcactccaatgacaaatggtacggcgtcacctataaagaagacaaagcaactgttgttgccgctattgccgctttaaaacagcgcggcatctatcagatgtaaatctacatgtttttactaaatcgaatgacaacaaaaggagaaaaaatggtaatgagaaaaacaaaaatcgtatgtacactcggtcctgcaacaaataatgaagaaaagatcagacagctcatgttgaacggcatggatgttgcacgtatgaatttttcccatggtgatcatgcatcccatcttgcaacactgaatattatcaagaaagtcagagaagaactgaatcttcctgttgcagccctgcttgacacaaagggtcctgaaatccgtgtctgcaagtttaaaaatgacagaattgaactgcatacaggcgatacattcacactgacaacaagagatattgaaggtacacaggatatcgtcagcatcacctacaagaatctgatcaacgacgtacaggttggcggcagaattctgatcgatgatggtctcattgaattatctgttatcaagaaaacagatactgatatcatctgccgcgcattaaacaacggtgctgtatccaacaacaaaggcgtcaatgtacctgactgccatctgacaatgccttatatcagccagaaagactatgatgatatcgtttttgcagtagaaaacgattatgatttcattgcagcatccttcgtaagaaacgcgcaggacgttcttgatatccgcaagattctcgaggatcataacggaacagatatcaagatcatctccaagattgagaatatgcagggtgttcagaacattgatgagattatccgtgtatcagatggtatcatggtagctcgtggtgatatgggtgttgaaattccatttgaggatgtacctgtactgcagaagatgatcatcaagaaagtttacgaagccggcaaagttgttatcacagctacacagatgcttgattccatgatgaagaaccctcgcccgacgcgtgcagaagccacagacgttgccaatgccatctatgacggtacaagtgccatcatgctttccggcgaaacagctgcaggtctttatccgatcgaagccgttcagacaatggtgaagattgctgaaagtacagaagcttccatcaactaccgcaagcgttttaaagaaagaacaacacttgtaaaccctgatatcacaaatgccatttcccatgcctgctgtacaacagcaatggatttgaatgcatctgccatcatcagtgttacgaaatccggcttcaccgcacgcatggtttccaagtatcgtccggaatgtgctgttgttgcttgtgtcatgaataaaaaggcttatcgtcagctgaacctttcctggggtgtaacaccgatcatgatgtgccagcttgaggagaacacagatcagctctttgacctggccgttgatactgctgagaaaacaggcattgttcagcagggtgaagttgttgttatcacagccggtgtacctcttggtgtttccggtacaacaaaccttatcaaagtccatgttgtcggccatgtcctgatgaagggcaagagcatcaacgacaaggttgtttctggcaatctctgtgtatgcaagacagccagcgaactgctccataactacaaaccgggtgatatcattgttattgaagaaaccaataatgagatgatgccgcaacttcgtacagcatctgccctcattgttgaaaaaggcggtctttcatcccatgcagcagtcgtaggcatgagccttgatattccagttcttcttgaagctaagaatgcaacagaaatcctgaaacagggcgctttcgtaactgtggacagtaagaaaggtattgtttacgcaaacaaataacagacggttttgatcctgcagctgctgcagatccgtcacataaccatacagacaaaaaataatcctgcaatcggccttggtgctgcctgcaggattattttttgtctactttttcagctttatgaatatgataaataaacggttctttctatctaaaaggggttcatattgaatatcgttcgacagcgtacaggcaccgattccgcatataaacaaaatctctatggttccggtattggcattgctgttttagacagcggtatctatccccatccggattttatgaatcatggcagccgcattacggcattccgtgattttgtcaaccatcgccagacaccttatgatgacaatggacacggtacgcatattgccggaattatcgctggcagcggctatttatctgaagggaaatatatgggcatggctcccagggcccatctgatcatcctgaaaattctggatagtaaaggaaacggcaccgccgaaaccgtctgtcgtgccattgaatggaccgtcagaaaccgttcccgttttcacattcacatcctgaatatctccattggtgccaaagccggagaggagacaacagagagccgaatgctcatagatgccgccgaatatgcctgggacagaggactgactgtcgttgcggcagccggcaataacggtccggcctccggaagtgtcacatcccccggaacaagcaaaaagattattaccgtcggtgccgcgcatgaaattacggtcccggaacacccctcaagcagctgtctcttttccggaaggggaccaacgcgtacctgcatctgtaaacctgaaattctcgctcccggtttcaggatctgctcctgcggtcatctacctgctcatccttatgtcatccgcagcggcacttccatggcctccccggttgtcagcggaggaatcgccctgatacttaataaatatccggatttaacaaacaaagaggtcaagcgctgtcttttaaaaagcgcccgacctctgaattacccaaaatcctatcagggctggggattctttcacatcccggaatgcctggacggcaggtgcggcagtcattaatccaggctgtcatcgtcgccctccagctcttcccataattccattaatgtcagctgttcttcatccaaagcttctttttctttgttgatctccataagacggctgacattggtataaacatcttcctgaacaaggagttcatccagttcctttaatctggcatcaatggcatcgatacgctccattgttttcttcagctggttcttacgttttctttcctttgcctgcagttctttctgctgtttatagtccattttggctgcactgacagtctccgtagtcactgtctctgaggcaacggattcaccggaagactctgttgcagagggattcagctgtttctcaacataataatcataattgccgttataattcgccagaccgttttccgacaattccagaattcttgttgcaacctggttgataaaatatcggtcatgcgaaacaaaaagaactgtaccgctgtaggagcgcagtgcattctcaagaatctctctggacataatatccaaatggttagttggttcatcgagaatcagaagattggcatcagagagcatcagcttggccagagaaacacgcccgcgttcaccgccgctcaagtcacggatatatttaaatacatcgtcgcctgtaaaaagaaacgccgccaatacattacgaatacgggtatgggtcatagacggccatgtatcggaaatctcatcaaaaatcgtcttattcatatccagaacctgatgttcctgatcataataaccaatatggacattactgcccaaatggacaagacccttatcagcaggaataacctgattgataatcttcaggatcgttgtcttgccggtgccattatccccgatcagtgccaccttttctgaacgtttaatatcaatatcgatattaaagaaaagacgctgctccccaaaggctttgctcaggccttcaatgtgaagcacatcattaccgctctgcacatccggtatcagggacaaatgcatataggtattgacttcctgaggcttttcaagacgttcggtcttctcaagcatcttctcacgactctcggcacgtttaatggatttctcgcgattaaaggatttcagcttggcgattacttcctcctgatgtttaatttcctgctgctgattcatccaggccttcaattcagcatcccggatctgtgctttcttctccgcaaaagcagagtagttgccgctgtacattctcgccttatggttctcaatctcaacaaccttggtaacaatacgatccagaaaataccggtcatgggcaacaatgatcacagcacccttataattctgcaaaaatgtctccaaccaggcaatcgccttcatatccaaatgattcgtcggttcatccagcagaataatatccggtttcgtcaaaagcagacgtcccagggaaattcgcgttttctgtcctcccgagagagaagataccttcttattaaaatcctcctcagtaaaacccagtccctttaatacgccggtcacttcactctgaagggcatatccattttcctgctcaaaggcatggttcaggcgatcataggctgcatacatctctggcagtttatcctcatctgcatgcttcatatccaattcaagctgacggagcttgtcataaatccgcacaacattctcacggaccttcatcatttcctcataaattgttgcctctgaatggatatcctgatgctgggccaggtaaccaatggtcttacctctgctgataatcacttcaccggaatccggtgtcagttcgcccataataatcttcagcaacgtggatttgccggcaccattaatgccgacaatggctgttttctcatgttcttctatatggaatgaaatcttgtcaagaataacctctgttccaaaggccagactaatctgctggcaagatagtatcatatgaaactcctcctgtttttaaactttacttttcattataacgtttcatggaaattgtttcaagctttgaattaaacaatacagaatacgtttattacatttattcatacgtttataataaaacattgattgacaataaaatatcattccgttataataaacatgtatagcatcggctattgtgaatttattatcagattttttgtacatatctctatctgtataaatggttagaatgaagatacgtatacgaaatatagaaaacaggagtgattgaaatgtcagaaagaggtatatcatcagcagtaatccgtagattaccacgatattacagatatttgggcgaattactggagaataatgttgttagaatttcgtcaaaggaattaagtatccgaatgaaagtgacggcttcacagatccgccaggatcttaacaatttcggtggattcgggcagcagggctacggttataacgtcgaatatctcttcgaagaaatcggaaagattcttggattgaacacaatccagaatatgatcattatcggtgccggcaatcttggtcaggcattggctaactatgactttgaccgtatcggttttaaggttatcggtatttttgatgccaacccacgtcttgaaggtctcgctgtacatggtatagagatcaaaatggtggacgagctggaagaatttatcaagacccatgagattcacgttgcaacgctgaccgttccgaagaagaatgcgcgtacgatcgccagccagctggaagaatggggtatccgcgcaatctggaactttgcgccaacagatctgcatgtgtcagatgacgtctgtgtgaagaatgtccatcttgacgagagtctgatgacattatcttataacttccgcaaccgcggcaaagagaaatacagctatcattcctatatggatgattaatgaactggatactgatttttagctgaagcgtcaatggttggctcttcagctaattttctgtttaaaaggagataagcactatggaatatcttgtcacaggcagacaggccaaagccattgatacgtatacaattgaacacaccggcattccatctcttgtccttatggaacgggcttccctgaccattgctgaagagactgcacaagtggctgcacagctgaagcttcctgccgtccggatcgcagctgtatgtggcagcggcaacaatggcggtgacggcatcgctgccgcacgaattcttcacagcagaggatatgatgtcacgattttcttcgcaggcctaagagaaaagatgtcaccggattgtcagaaacagttgtctattgccgagaatttgtcagtcccgatcagcaatgacacggaccttgacgcatataatataatcatcgatgccatctttggcatcggccttgaccgtcctgtgacaggcacttataaggactggatcaccgccgtcaacagtgcatccgaaaacggcagcaaagtcattgctgtagataccccctccggtatccataccgacagtggtcagatcatgggaaccgctgtccatgcagacagaaccgttaccttcggctatatcaaaaagggacttgttctttatcccggtgcatcctgtgccggcaaagtcatctgccgggatatcggttttgatccggcagctgcaaaaaccataggtctgcaatacatcacctataccaaagaagattacaaacgacttccaaaacggtatgcagactctcacaaaggaacttacggccatgtgctggttattgcaggcagcaagaatatggcaggcgctgcttatttttccgcacttgctgcatacagaatgggggcagggcttgtcacactttatactccggagagtaatcgctgtattcttcagcagcttttgcctgaagccgttttgaaaacttatccggatacagcccctgacctttcagcgctttccgatcagctgaacaattatcaggccattatacttggaccggggcttggtcaaaatgctgcttccgaaaatattgtcagaacagtaacagcctcggatatcaagattcctctgatcattgatgctgacggactgaatatcctgtcaaaaaacatggagtggctgtcaaaatccacggttccaacggtcattacgcctcatatgaaggaactttcacgattaactggccataatatccaatatcttaaagaaaatctggtacaagtttgtgaaacatttacgcgtgaatatggtgtaatatgtattgcgaaagatacaagaacaatgattattgataattccgaaacaatatatatcaatttatcaggcaataatggcatggcaacaggcggaagcggtgatattcttacaggaatcattgccgggctttgtgcccagcacatgccattatccgaagccgcccgtctgggtgtctatcttcatggatgcgcgggagatacggcagctttcaacaaaggatttcattcaatgacagcttctgatgttttaaatgctatccccgaattattgaaagagatcactttagactaaaaagcaatgcttaatttggagggaaatatgaaaaacacttatcgtgcctgcgccgagattaatttagacgcactgaaacataatatccaggaaattcaggctgttctcggtgataccaagcttatgtgtgtcatcaaaacaaacgcctacggccatggctctattgtccttgcccgtgaattagctgcaatgggcgcttacggttttgctgttgcaactgttgatgagggtattgaactgcgaaataacggtattatccagccaatccttgttctcggttttgttgccaaagaacagtatgcagatatgatcacccatcatatcatgcctgctatttttacatacagcatggccaaagattttgatgctgttgcaaacgccatgcacacagttgccgatgtgcatattaaactggatacaggaatgagcagaatcggcttcaaatccgatgctgagagtatcgaggccactgttcagggtattgttatgatcaattctctgcttaagaatatccgtatcgacggtattttcacacattttgcctgtgcagactgcgaagatgatcatatgacatttaaacaactgaagcgttttgacaacgtcatcgaccgtcttgagaaaaacggcgttcatattccgatcaaacattgtgcaaatagtgcagccattatcaaataccctggcatgcgcatgaatatggcccgtgccggcattattatctacggtctgtatccttctgatgaagttgacagagaagttatcaaactggaacctgtgatgcgtctgaagagccatgtcatctatgtaaagaccgtggaaccgggcaccaccgtcggatatggagctacttatgtctgtcagcgtccaaccaaaattgctactgtttccattggatacggcgatggctatccaagagcattatccaataaaggccgcgttttgattggcagtcagtcctggccgatcatcggccgtatctgtatggatcagctgatggttgacgttacagatgctgattatgagatcaaacaaggcgatgaagtcgttcttgtgggctctcaaggcagcgaatccattcctgtagaagaagttgccgccatcaacaattcctttaattacgaatttgtatgcgatatcaatcgccgtgtaccgcgtgtttactatcgtgacggtgaagttgtcgatatcgtgaattatcttcggtgataatcagagattttcgcagtcctgatgaatacacttccgataaacgggaataatagccttatagtttatcaggagtgtgatatgcgtgattattaaaagaggcgatatctattatgctgatctccggccggtgatcggttcagaacagggcggggtacggccagtactcattattcagaatgacaccggcaaccgccacagcccgactgtcatctgtgctgctataacatcacggatgaataaggccaagctgcctacccatgtggaactggatgctgaaaagtacagacttatcaagaattccgttgttctccttgaacaggtgcgtaccattgacaagaaacgcctgaaagaaaaagtctgtcatctggacaatgaaattctcaaaaaagtagaccgtgcattaagcatcagtcttgaactggatacataattccggggctgtctcttaaagggacagcttttttatttgacgaacaacttcaaatctgatatatttttataaaacactacaaaaaggagagattattttcatggacgatggacaccccattatacggatcgtcatatttattattttattgttaattgatgcagcttttaccggaacagaagtagctgtttccgctgtcaatgagtccgttttgaccaagaagaaagaggaaggcgacagccgtgctgccaggattctgcgttttgtcggacagcctgctgcctttatgagtaccattgatctgatcggtgcagccgtgacgattatcgccggcgcatttgttgcacggcctttctttacggacctgacatttctcctgatgacccaggcacggttgatgtattggcctgctgcagttatcagtcacctgctcgtctgtctgatcattatttattttgtcactgttttcggcattcttttcccaaaacgtctggcttttaagtatgctgagaaatgggcttattccgccattcgtatcgtgacactgatcagtacgctctgcagaccttttgttgcactcatcaatggctctgtcggccttcttgtccgccttgccggcattaatccgaaggatattgaggagaatgtgacagaagaggagatcatcatgatggtcagcgaaggtcatgagcagggcgtaattgaagccagtgaagctgagatgatcagcaacattttcaagttcgatgacaaggaagtctctgatattatgacgcacagacgtcatatctgtgccgtggactgcagtctttccctcagcgaagccgcagaaatcatggcccgggaacgctactcccgttatccggtttttgagaatgatacagacaatattatcggtattctccacttaaaggatgtcatgcgtctgattgtcagcggtgaaacggatacctccatcaaagaagttatgcgtaagccggtatttgtaccggatacccagaatatcaattcgcttttccgtgaaatgcaggctaaaaagatgcatatggctattgttgtggatgaatacggtcagtcctgcggacttgtagccatggaagatattcttgaagaaatcgtcggtaatatcctcgatgaatacgatcccgatgaagacaacatccagattatcggcggtgcctatctgatgaaaggcctgaccccattagaagacatcacccgtactcttggcattacatttgatgataattttgaaacactgaacggccttctgatttccaagttggaacatattccacagaataatgaatttgccagcattgatatcgatggctatacatttaaagtcatgaatgtcaaagataacgccatcagccttgtaaaggttaccaaaattacgggttgattcttgctgaaacaaatgatagaataaataggttgatattattagtacgagataggagtgtaattatgtcaggacattcgaaatttgcgaatattaagcataaaaaagaaaagaatgatgctgctaaaggtaagattttcacaattatcggccgtgaattggctgtagctgttaaagagggcggttcagacccgaacaataacagcagactgcgtgatgttattgccaaggcgaaagccaacaacatgccgaacgatacaatcgaacgtggtatcaagaaggctgcaggcgaccttggttctgttaactatgagaataatacatatgaaggctatggtccaagcggcgttgccattatcgtagagacactgactgacaaccgcaaccgtacagctgccaatgtaagaagtgctttcacaaagggcggcggttccattggtacaagtggctgtgtatctttcatgtttgacaagaaaggccagatcatcattgacaaggaagaatgcgatatggatgctgatgatctgatgatgatcgcccttgatgcaggtgctgaagatttcagtgatgaagaagattcttatgagatcattacagatcctgatgatttcagcgctgtacgtgatgcccttgagaaagaaggcattccaatggctgaggccgaggtaacaatggttcctcagacatgggctactttgacaaacgaagatgatattaagaaaatgaaccgtattcttgatcttcttgatgaagacgacgacgttcagaacgtatatcataactgggacgaataagaaaggcgtaagacaatgtatcagtttggttttatcggcatgggtaatatgggatcagcaatgctcaagggatgtctgtctgtttttcccgccagcaccattgctttctcaagaaaagatgctgtcaaaggcaaagctttgtcactggaaaccggcgctgtttgggttgacagcaaccgcgtatgcgccgaacagtccagatacattattcttgctgtcaaaccgcagttttatgacggtgttttaaaagagatacagccagtacttgatgactcacgaatcatcatttctctggcgccaagctatacaattgcagatttgaagcagtcactcggtgcatctgcgcgtattatccgtgccatgccaaatacgccggcaatggtaggtgagggcatgacaggtctttcctggtctgaggatgttttttcagatacggaacgccaggaattaatgcagttctttacttctttcggaaaggctgaaaccgttcctgagaatcttatggatgcggttaccgcagccagcggaagttcaccggcttttatctatatgatgattgaagcattagctgatggtgttgtaaaatacggcatgcctcgagacaaagcctacacatttgttgcccaggctgttttaggctccgccaagatggttcttgaaacaggggagcatccaggtgtcctcaaagacaaagtctgctccccgggcggaacgaccattgctgctgttgctgcacttgaagcttccggcttcagaagcagcttgatcgaggcagtttctgccgtctgtgaccgctgcagaaatatgtagtcccatttacatgaattttgagccaatgcacatatcccctctgaattttgcatatactatgctgaatcaggggggatttttattcgttcgtatttattttatcatccatggcttttggatctgaccatgggcatactgttatcaattgttttattgctgatgacacagggcagttctccttcaacatttttctgccagtcagattatgaccgctttatcctggatttcacaacagacagcggattttttatttatctttttctatgccggtgtattcctttttatttgcttattgcactgacactcaaaaccagaagaaaaatcttctgtcatctgtatttctggtatatcggttttatttatggtactgtgggacttttatcagcttttgaatacggtatcaccggcctgatcttgtgtattttccgactcctgcctcaggtctgtttttatgtcccggctctttatgcgacctggcgcatgactgccggttttacggatcatctgctgcccattaacaaacgacttctcgttatcggtttattactctggacaatcggcactgcagtagaatgggcttttaatcccgttttactgcaatatggtattcaattacttttataacaaaaaataatttgattttttgttcacatttgactataataatactcatgatgttggggtcaaaaagtattttgacccctttgataccagattgctacgtgctttgcactctcgcaatcctcaaaaacattcgtaatccgctcatttttctttgaaaaatggctacttactcatgtttttggcgggtcaagaggtcaaaaatccttttgcaagcaagcttgcatctgccttctgaccttttgaccctggtatcatactcatattattaagaaactaaagaggcggcaaagcaatggaacaacaattagacaattttatacattatcttgaagcggtcaggaaatcctcccgcaataccattttatcctacaagcgggatcttgagaagttcgcggcttttcttgacgctcaggctgttgtcgatctgaccgatgtgaatgagacgaccatgaatgcttatattctcatgatggaacagaaacagtttgccacatccaccatttcaagaaatattgccgctctgaagtctttttttgattatcttgaacgatatgagaaccatcagggcaaccctgcagcaaggcttaaggccccgaaaatcgagaaaaaggccccggaggtattaactgttgccgaagtaacaaggcttctggaacagcctgctgggcgcaataacaaggagcttcgtgacaaggctatgttggagttgatgtatgcaacaggcatccgggtcagtgagctcgtttccctgacaattgatgacatcaatgtacaggccggttatattcgctgttccgagcgtggaagagagcgcatcattcccattggcagtgttgctcgcatttccctgcgtcagtatttgaagcaggcacgtcccgccatgatttccgatgacagcagcgcgattctctttccaaactacagcgggcagccaatgagccggcagggattttggaagattttgaaacaatacgctgcaaaggccggcattgaatcagatatcacaccgcatacattgcgtcattcttttgctgcgcatcttcttgaaaatggtgctgatctgcgttccgttcaggaaatgctcggtcattccgatatttctacgacacagatttaccttaagatgaacaccggaagaatccgggatatatacagccatacgcacccaagagcctagactcccgggtgcgtatttttatcttcccatagtattacctgtaccataaatcaaactatccatagtaaccgttgtcttggatgttccggctttcaatgtataactttcaccctgagcaattccaggacagctaatcacaacggaagtgtatttcttagaagtctgccagtttatcagctctgttcctgatgcatctgtcagaacgatatctgttcctgcctcctgacgatccatgttcaccagaacagacccctgcgtcgaattattaccaaaattcaccgccatgcctgaagaacctgctgcaactaaaataccgcctgtaatgactgcatcggtttcataatcaagggcaccgttgccatcacctgtaggtccggaaacataagtttcaccgccggaaaccgtcaggattctgttagcatcaataccatcaccttctgcatctatttccgtatggccgccgctgatttcaatcgtatcaccattgaaaccgtcatcactggatgtaagtgtaatctggccgccgacaatcagaaccttttcattaccttcaataccttcataactttctgaaatagcaatcgtgccgtcatttactatcacctgaccgtccgcgtggacaccatcatctccggatgcaatcgccaatgtaccaccattgattgtgatattgctgtttgaatgtatgccatcatcagccgcgttaatcgtatatgtacctccggagataattaaattgccttttgctttgataccttttgtactggttgtttcttctgtttcagtttcttcatctgatttgtccggttgctccatcatctgtcccgatggctgttgatcgtctgacgacgatgtcggccggttatctgctgattctgaattatccgatgaagtatcgtcctgactgttatctgaaggcggcatcatctgatcgttgtccgacatttctccacggttttccttcggacgttctccagaagtcatcatgtcttcgccagggttatccatgccgcccgggccgcctgaacctcctggtccgccttcctgatggtccttgccattttcactgcctccgcctgttgtcatggtatacatgccatccagcagcgtcatatttcctgatgcactgatgccatccccggatgccgtcaaattaaaattaccacctgcaatatagacaaatcctttttctgcattgtcttcattctccgaatggagcgcatctttacctgatgtaatcgcaaaatcgccatccagaatacgaatgctgtctttgcccgaaagcccctgactagccgctgtgatagcatatgtaccgcctgtgattactaaatcatcttttgaaacaataccatgccccgccttagccgtaaccgtcaggctgccgctgccatttagtgttaaatctgattttgaaaatatcacgctgtcaatattattatcatcaacagcttcatatgtaccgccattactgagcatattctcactgtctggcgcaagagtgataaaaaccttatctgccgattgaacataaatagccgctgaactgtcattattaatgacaacaccgttgaatatcagacgaacttttacattttcatctgttgcaacaaccactgagccattggacagagagccggagagaagataagtaccttcttctgtgatggttattgtctggccatctatggcaactgatgtattgtcacagctgctgccatcatctgacaaagtgatagccacacatttctcctcatcataacctacctctttatccctgtccgtaaacatactgtctatatcatctgtatcactctgactagccgctgattcttcagaacccgactgttctgtcaccgccgaagaatcagctgtatctgaattgacgtttcctgctgttttcccacaaccggagagcagcagcaatgcaatgcagcaagccgccgctgttttcctcattccacgtttcatatatttctccttgtttaaattctttcaccatttcttatatttaaaacattcatctctaatacttcattcgtttatcacgctttctatagttcggcagcaactgtatcctgtctggataaattaatttccagattgccgttacggcagcggattctatctatcatttctttttctttatctgtattttgcatggtcagctgatatgtcagcttatataaacttcccatgtttgttgtttttacattgacaagttcccatttttcagcataatctgcaaaaatttcatcaaatacacccgtatagtctaaatcctctggtatcgtgacatgaagggttttatattttgccgcattttttctttcaccgaaatctattctattatagatcaggctcatgccgccaaggagcactgcaaataataccgcataagccagatatcccataccggcaatcatgccggaacccatggcaagaaagagggcaccgatttctctggcactgccgggtacggaacgaaaacggaccaggctgaaagcaccagcgactgcaacccctgttcctacattgccattcaccatcataatgactgcacacacaatagccggcagcagtgcaagggttgccacaaaactttttgtatatcgattcttatacatatacattcctgccagaatcaaccctacaacaagcgcacacatcatacagagcataaaatccgaaaaggagatcacactcaccagttcactgtcaaaaattccactaaataatgttcccacttattaaatcctcctgaaaatgctattttgtttttttattttttatgtactgctgaaattattacaggcagaaattctttacactgctgccatcagcatttgctgataagctgttccatatttagagtaggatgttttgtaaagatgctgctttgtcagacactgtgtcatccacaaaggcataccgcccggtgttttaatctccataatcgacatcccttttgccagaatcggctgaccacctggttcttcatccagggaaagcctatctgttcggctcaaaatctgttcatcaaaagtgacacgaaaatcactgccattcgtagcgtaataggcttcacgctcataagaaaggtagaccaccggcctcagtgactgataatagtcacaaaaatacatgatttccttttcaatctgggaatctgtttgaatgtcggatggattgttaatcagaccaaaagcttcattctgcggcagcagaattcttcgtttataaacaacagactgatactttttcttcagttccagaaatacattgtcattttgcccggctttccggtaactgcgcattctgagtttttctttataaacaggtttttctatggagcgacggaccagtctgtagttatctgtatcaaaatagatattcctgatcaccgaatgtccaaaatcatccagctgcatataaggtttcattgcctcctgaatagacagtctttgttctgacgtcaacaggtatttgatttcatatcttttaaatatcatctgatttttcaataatatcaactcctccgctttttaagatgacattattgtacagtgcgaaccttaaatgaaactaaaaaagaaaataatttgacattcccgctcaaatgacctatcattgagaaaaagaaatgaaggagataaacatcatgcggttactttttgcagaagatgaaaaatccctctccagggccattaccgccattttaaaaaataatcattatgaagtggatgctgtctatgacggtgaagaagcccttgcttaccttgaatgcggtacttatgacggcgccattcttgacattatgatgcccaaaaaagacggcctgactgtcctaaaagaaatacgtcgtcagggcatcaacacacctgttttgatgctgaccgccaaggctgaaatcgatgaccgcgttctcggtctggacagcggagccaatgattatctgacaaagcctttcgctgcaccggaattactggcgcgcatcagagccatgacccgtacacagatgacgcagaatacatcctccctgtctttcggcaatctgtcacttaatcagacttcctttgaattatcttcaccttcaggctcatatcagctgaccaataaggaatttcagctgcttgaacttttaatggccaaccccggacaggttatttcatctgaccgtctttttgaaaagatatggggatacgagagtgatgcagacccgagtgtcatataggtctatatttcttacctgcgcaagaagctgactgcactgaatgcttccgtccgtatacgtgccatccgcaacgccggatacaggctggaggagatccaatgattcgaaaactgcgttttaaactgatttcagccgccatgatatctctgtttatcgtcatcaccataatcattggcatcgtaaacattttgaattatcacggcattgtacaggatgcggacgggattctgacgattcttcaggacaacaacggccggtttcctcaacagaacacacagacggatattaccaaacaatcccctgaagctacagcgcccgttttttcgccggatggccctggcagtgaatccgattcaatagagaatgcatccggcgtgacacaggcagagcctccaaagggaaataacaatccccgtctgcagtccccggaacttccctatgaatcccgttttttctcggttcttctggatgaaaacggaacagttctctcaacagacacaggcaaaattgccgctgtaaacagttcagaagcaggagagtatgcgaaagagatcttacagtccggcaagagaacaggctttttcagtgcttatcgttatcttcgggcagaaacagacagtgacagccacacccgcatcattttcctggattgcagcagaagccttaacagttttcgcaatgtcctgcttatcagctgcggcgtatccggccttggactgatgatggtacttggactgatgattttactgtccaagcatatcatcaagcctttttccgaaaactatgaaaaacaaaaacgttttattacggatgccggtcacgaaatcaaaacaccgattaccattatcaatgcagatacggaagtcctggaaatggatacaggtcccaatgaatggattgatgatattcgtgtccagacggaacgtctcagcaaattgacaaaggatctcatctatctggccagaatggaagagggagagaatcagacgcagatgatcgattttccactgtcagaagtgatcagtgaaactgccgcctcttttcaggcgcttgctcgaacagaatccaaacagcttacactgaagatacaacccatgttgtctttttacggggacgaagacaatatccgcaggctgacttccattctccttgataatgcattgaaatattccgatgaaaacggcttcattcagttaaatctcgaaaaaaaaggcaaatatatccgtctgcttgtcgtgaatacaaccagagacgcgcttaatagggaacaactgacacatctgtttgacagattttaccgcatggatacttccagaaactctgaaaccggcggttacggcattggtttatccatcgctcaggcggttgtacaaatgcataaaggaaaaatatccgccgccgcagtgaatgaccacaagattcaattgtccgtattgctgccgatccgctccggcagaacatcctgataatgactatctgtttcgatgaagacttctgataccaaacgatcggtcatttttaattctattagttagtagattagtaaaaagaagtgattatatgtactgggacattttaaatgagctgctgcataaagactgtctgcagcagctaaaaaaattcaaacaacatcggttcacaacaacctatgagcattgcagacatgtcgctgttatgagctatcaattagcagagaaatggcatatcacagtcaatgaaaaagcgctggctgtagcttgtatgtttcatgactattatctgtatgacataaaggacgagcatctcgggccatggcatcatggaacacggcatgccagcattgccatcagaaatgctgagaaagtttatcctctgaacaatctggaaaaggagattatcagaagccatatgtggcctctgaatatcacccaaattcctgcatccagagaggcctggcttgtctgcctggccgataaagtctgcgcagtggaagagatgttcccgtttctggcaactaaaaactcgcacctgtcagatagcggcaattcttaacatcctgtctcaaactcagctttccctgagtttgacaacattagcagccatccggcgtctatgttcatcgatggctgcataatgtttcttggtagtgttgacatccttatgcccaagggtatccgccacaagataaatatcccccgtttcctgataaagcgctgtaccaaaggtgcttcgaagcttatgaggggttatttttttgactgtggtgacaagtcttgaatatttcttcaccagccgctcaacagaccgagttgtaatacgtgtcttatttaaagaaataaagagcgcttcttcgtgtccagcagcaggctcgactgtctttctcggtccgttcatataagcctccagcgcctgactgacctcatcaccgaagtaaatcaacgcctcattaccaccttttcgaatgattcgaatggcaccattattaaaatccacatcctcaagattcaaaccgacacactctgacacacgaatgcctgttcccaaaagcaatgtcagaattgcaacatctcgaacttttgttttctcatgggacgccagctggcgtccggataatttctcaccggattccgcctcatccaggagctgcgcaatttcattcggatccagacggataatattcttattcttgatttttggcacatctacctgacgaggcggattggtcctaatcaggttcttcttgaaataatagtcatagaaagacttcagtgatgaaagttttctcgccttgccttcctcacggtttgtatacaatttgccatccttggtataagattcaagataagaaagatattcctcaacatccatagccgtgatcatatcaaggacctcaataggcagcgtatgtatgtctttatccttaaaatagggattattggtcttaagaaaataaaaaaatacacccagatcataagcgtagttcttacgggtatttgtgcttttacggatttccagagatctgaagtattcaccgcagaatcttggcaaaatctgtaaatgttcacgaatcttttcaatgttctttaaatcctgttgatccttatatgataattcagccatccgttaaacctcccaaaatttattcactataattcattaaaattattctgcctgcgccatacagtcaaagaagcagtacacaaatatgaaactcttcaaaacatgcaaataattgcaatagatataaaacagtttaccataaaaatattatgtcaatcaaagcgccttttctggattgaataaagtcattatatcttaaattcctttaaaaggcaatatcatgtcgtaaaatattgattttgcgacatgatatctgtcacttctatttgtctttgacaaggttgttttagctgtgtataatcaaagaatcggtaaaatgcaatgtacagaataatgctgtcattataaatacattaaatacgaattgtcacatgctgctatgattcaccatatggcatcatgtactctcaattgaaaggaacaatctaaaactatgaaactgcagcaattatacagctatacacgccgggccattgatacctggcaaatgatcgatgaaggtgacaaaatcgccatcggcgtatccggtggcaaagacagtttaactatgttatatgccttaaaaggccttcagcgcttttatccaaagcattttgaacttgaagctataactgttgaccttggtctcggtaacttcaatatggatgccgttaaaagcttatgtaatgaattaaatattccttataccattgtatccacagaaatcggcccgattatcttcgaccaacgtcacgaaaagaacccctgttcgctatgtgccaaaatgcgcaagggtgcgctgaacaataaggcactggaactcggctgcaataaaatcgcctacggacatcatcgcgatgacctggtagaaaccatgctgatgtctctcatctacgagggccacttctatgcattccctccagttacaaaacttgaacgaaccggtctgacggttatccgtccgctgctgtacatgaccgaaccggatatcatcggctttgcccgaaaacaaaatcttcctatcgccaaaagtccatgtcccgccaatggccatacccgccgcgaatataccaaaaatctgatgcatcaaatcaaccgagaaaatccgggagcgatcgataaaatgttcaccgcgattctgaacggcaatatctccgactggccgcagtcaatgccgaatccgcactatcacaatccgtaaccgtgagcattcaatacatcatcttccggatgcatacacagccgtccggtttcctacagaaagtataaaaacaaaaagcggataactgcctgattcaccttcttccggtcgatcacctgtttatccgctttcgtaattataactgctcattcatcctatatcttcattcgcgatctgatctgcttatatgctcaatggccgcctgcatcggcatctctaatccggtcagtttctcatatcttcacctgctgccgccatctgtgtattctctgccacatccccttcacatggaatgatcaacagctgtccttcataaatcatcgcctgattcataccattcgcacgcatcacatcatggatatagtcctgatgattcttaaaattcttccccatatagctgtctgccagcccccataatgtatcgccatactgaacaacatacgtcttgtactcaatctgacgcatattcttctcactggctgccaccttaaagtggctgataggaatcactagaataccgatcaggattaatataaacgcagcgatcaccatacgaatgcgtctctttaaaaccattttccttcttctcatcacttcatccctccacattttatcaaatgcaaacaatcgttccgaacacattttccaaacattcgtttgttatgtttgtattatacagaacaatagttcgtttgtcaatagaatttctttacatttctattaaatttcaaacatttgtttgcaaatatacgtttgccgtgttatgatagtatcagtgataaaatagtttgttatccatacaggaggtattgaatatgtcaaatggtaaaatctctgccaagcagcaggaaattcttgaatacataaaatctcagttattagcgaagggctatcccccttcagtccgcgagatctgtgaagcagttcatctgaagtccacatcttccgttcactctcatctcgagactctggagaagaatggttatatccgaagagaccctaccaagccaagagccatcgagatccttgacgatgaattcaatcttgccagacgcgagatggtgaacattccaatcgtcggtactgttactgcaggcgaaccgattctcgctgttgagaatatcacaggttatttccctgtaccaagcgaactgatgccgaacgcagaactgtttatgctggctgtcagaggcgaaagcatgatcaatgccggcattttagatggcgatcatgtcattgttcagcagcagtcttctgccgacaatggcgatatggttgttgctctggtggatgattctgcaactgtcaagacattctataaggaagaagaccactaccgtcttcagcctcagaacgatgctttctctcctattatcgtgaagcattgtgaaattctcggcaaggttatcggccttgtccgtatggatatgtaatttatatctgtccggacgttttgtgcagcagacttttcatattttattttctgttttagatactgcctgcataacagcaataagccgccagctgacatctgtttttcgatcatcagatgtcagctgacggcttattcgttttatttctttactttcaaacagtactattcttctgtctcaaattcacccacagatacttctttgccgtctctccagattctttccagatcatagaatgttctggattcatcagaaaagatatgcacgataatatcgttgtagtccatcaggatccaattagcgacgccatagccttctatctggcgaggcccataaccggctattccaagggcctcacggacgctgtcagccatggcctgcacctgattggtattggaaccgcttgcgatcacaaaatagtctgcaataacagataccccagcaatgtcaataacacgaacatcattggctttcttgtcttccagtgcagcaattgcaagtttggtcatttttttagactgattcatgcttacctccattaattatctatatgcacattgcagattcagatatagaatcatgattctgcatcctctgcacacttctgtaagtaataactataagtaacttctgtggcaggatcgatctccccgccctgatcacgcagataatccaatgtctgcttcagaatttcgcagactgcctgatcaatgtctgtaaatgccagttgacgaagccatgcaagattcggtgcctgatcccgccccggctcaatataatccgctgtaaaaacgattttctccaaaagtgtcatatccggcttaccggtagtatgccattcaatggcgctgaggatttccggatcctcgacaccgtatctgtgcccggctagccatgccccgactcttccgtgaagcaggaacggattcttagcctccatatctgaaacaggcaaatggtggctgcggcacttctctaacagcttctcaccagacatatgcttagcacaatcatgcagcaagcccgcgtaggacgcctttatcagatcttcaccatagcgcatagccaaacaaatggatgtatagcgcacaccgatggtatgtctgtatcgatgcggattctgtttctgctgcaatatctcttcaatttcctgtatttccatcatcaaaatttccttctgtctgtcctgtcattccagtacaacgttttcgaagcaactatacccatcatttgtctgcaaattccgaacagccgaaaggctgctctcatctgcaatacagctgatgttcctctatatattcccgaacaccctcaggaaccataaaacgaatcgactgatgttccctgacacgatgcctgatttcgctggatgacagtgcaagatccggaatattcaggaatcggatatctgcatgatacttcgcctcaagataatccatctgcttcttgaaaacatcatccggcgtatggtttctcatagccgccagtatgacacaatctgccataatgaccgccggttcatgccatgtctcaatctgaaaaagggaatccgcacccataataaaataataatccgtatcaggatgtgccttcttcagctcctccagggtgacagaggaataactgtaccccttccgtctgatctccatatcagaaatccgaaaatagggaatgccttccaccgccagctgaagcatagccagtctgtggactgccggtgtaatgattttgtccgttttgtgcggcggatctccattcggcagcatcagcacttcatccagtccaaagctgtgataggcattctcagccagcgtcagatgcaccatatgcacagggtcaaaggtacctcccatgattccgatacgttttcgtcggctcatcgcaagcatctcctctgagtatattatttctcaggaagaacaattttctttttgttgtccttgccttctttataaagaacaatctttttgccgataacctgaaccacatctgcatgtgtacgttcagccagtacctctgccatctgacgcggatcatcaagacaattctgaagaacagaaatcttgatcagctctctcgcttcaagggcttcttccacagcttgtgtcagttccggtgtcacactggatttaccaatctggataatcggtgtcatgttcatggcaagccctttgagataggctctctgcttactatttttaatcatctgtattatccctcttatttataataatcaaattccaggccatacatacggaccgtatcgccctcctgtatacctgccttttcaagttcatcaagaataccgttttctttcaggaatttctggaagaaatcaaaacctttttcagattcaaggttcgtatagccaagcatcttctcaatacgcggtccctctacaacataaaccccgtcttcaacgctgactgtatatggttcctcaacatctgtattcaccggtacatattccggttcaaatacaaccggctcatccccgatctgatccagcatttcacggacataaaagagcagttctctgactcccttgccgctgactgcagaaataggaaaaaccttgattcccttcggctcaaattcttctcttaacaatgtaatggcatcgtcattttcgccctcataaagggtatcgatcttgttggctgcaatcacctgcggacgtttcgcgatctcaggattgtaggcttccaactccgcattgatcttgtaaatatcatcaatcggatcacgtccctcaacactggctgcatccacaatgtgaatcatcaccttcgtacgctcaatatgacgcagaaactcaaaaccaagtcccacaccctctgatgcaccttcaatgatacccggaatatccgcaatcacaaatcctctgccatccggaagatccacaacacccagattgggattcagtgttgtaaaatgataattggcaatcttcggacgtgcattcgtcacacgggaaaggaaagttgacttgccgacattcggaaaacctacaaggcctacatccgcaatcaccttcaattccagggtaacaacaagctccatggctctctggcccggctgagcgtatttcggtgcctgcattgttgctgtcgcataatgctgattgcccttaccgccgcggccgccctttaaaacagtcacccgcttgttgccatgggacatatctgcgatcacgcgtcctgattctgcatcacgaataaccgttccttccggcactttaatgatcagatcttcaccatccgcaccgtggcagcggttcttgccgccgtcttcaccgtttggtgcacagtacttcttcatatgacggaaatctgataatgtatttaatccttcgtctacaacaaaaataacgtcgccgcccttaccgccgtcgccgccgtttggtcctcctgcaggaacgaaaagctcacgtctgaagccaacgtgaccgtcaccgcccttgccggagcgtatatatatcttaacctgatcagcaaacataaaaacactccttcctgccagaacagccgcatgccgcgctgcctctgtcgttttaattagatactgattcaaaaaaacgacttcaaatatcaaaatctgaagccgtttaatctattattcgtttactacgactgggtagatagaaacctgtttcttatctctaccttttctttcaaaccttacaacaccgtcaaccagtgcaaataaagtatcatcgccgcctctaccaacattcacacctgggtgaatcttagtaccacgctgtctgtaaaggatattgccagcttttacaaactgtccgtctgctctcttcgctcctaatctcttggactcggaatctctaccgttcttagtagaaccaacaccctttttatgagcgaaaaactgaaggttcattgttaacatgagttacacctcctcgatttcaaaatgtataaactcactgtactgctccgagagtgactgcataccgatcaccagtgcatcgatgagcaatgctgcatcatgtcccggcacatcatcaaaatcaaagtcaaccaaccctgtttcttgatctgctccgacgctgaatgcatcttctgtcagtgcttcaatggcgttgcatgtattcaatgtaagcactgaaactgcactgcagacaatatcttcaccgggctctgcatattccgcatggccgtcgcatctgaaacctgtatagtgattattcttgtctttatagactgtcacactgatcatcacatgacctcaaaattaagcgttgatcttttcaatcttaacttttgtataagcctgtctatgaccgttcttcttatgatagccagtttttctcttatacttataaacgataaccttcttagccttgccatcaccaacagctgtagctgttactgtagcacctgctactgttggatcaccaactttaacttcgtcaccacttacaacgagaacctgatcaaaaacaacttcagcaccagcttcaacaccaagtttctcaactctgatgacatcgccttctgctactttatactgttttccacctgttgcaataattgcgtacatttatagggcacctcctattcacattactcgccagttacggtatttgcaaagctattctgcaaatttagacctcactgtgcggcatcttctgtatactaccatgttttttaaactctgtcaaccgttttttcatcaacttttgcgtctttttttcggaatataaactgaccaataacaaagtaaggccagagataaagcatcattctctttccctctatcatgacaccgaatctgtgaagcagatacacagcgatcaattccgtcacgcacacggcaagtatcatgccatacaagccttctgccttctccggtttgaaaaatcttcctgaagcaaaaaacatgatcaccgccacaacggcataacccaccatggatgtcagcggtctgaaatagccaagctccacttcactcttatcgataaaaagaatatgctgtatactgtttttgaaggttgtgattttttcaccccagaagtcaaaatcagaccaggtattcggtatcatatccgcaggaatcgacggttttgcctgacaaatggcaaagaacaccatgatcatcacagccagccccacaaatccggccgccagccagaaaggacggtacctgttgaccatcagaaaccggataccgcgaatcaccacaagaatcagaatcaatgccggaagaagaaacataaaaaacaccgccagccgctgataaatctgacaatctgttttatcgctgcccaatccccatctgttttcaaaagcctgaagatattccgttctttctgcattgccgcttatctctgttcccggtttgatgacaattttgctgaaggatggttcctgagctgcattgcctgtattccctgaatcagcagatgctgtccctgtatccgtcgatggagctgaagtatctgcatccgatgccggataattgttctgcccgctattttcgctctgcttcttgtcaaaaacagcctctgccggaagaataaccaccgcattcgtatcctcataaacacctctgacatagtagcttttttcattataagtcacaatgcctccggttatggcactctccccaaacagttcccaggccgctttactgctcaatacacatccggtcagatcgtcctccatcaattcgccgtccgatgaacacagattctccgaactgccatatatataggtaagcgtacctgtcagagttttaccgagatcatcattggtaaaggtctgctgatcaaggctccccaccgccgtaaagggaagataattctccagttcctcatcgttttttcgcatgtcctgcacagttgacagggaatagccctctttcagataatagatcaccggcgtaccatagcctccgatttccgtacccatggccagaatatgtccaaagcatacgagcatgatcaaaagaaggatatatttacccgcatgctttgccgcccgccgcattattctccctccacaagacgcacacggtctccgttgcgcagtgtcttgctggatgtcaggacaaattgctgtccccaactgaaagagccttcaatggctgcctgttcattattcttgtccagaatatccacctgaaccttatccaccgctgtttctgtacccagaatggtatccttttcattgatcacatacacatagtacttgtctccgtcactatgcagcgcaccaagcggaacacatgtatcatatttcttgctggctttctccactttcaatgtagcgatacttcccagtttcttgacctttgcagggatagaaaccgtcaattcataggaattcttatcttctgctgaaacatcaatactctgtaccgttaaaccttcaacggttgtgccgttgccaagatccagggttaccttatcatcctttgacagatatttggcactggccttgtccaaggttgctgtaaacttatatccggcactctgatctgaaatacggatggctgtatcttctgtggtcgtctcaccggttgtcacattcacctttgtgatcaggccatcggaaggtgccgtgatctttccgttgacatccatcaccttctgaagctcatccactgccagctgcttttcttccagatcatcatttgcagtcaatgccgtcgcagtatcaacgttctcaggtgctttggcatcctccagcgtccggttcgcagactggatggtggactgccgctgcttcactgcttcattataagcttcttcctttgctttataatcatcatacaatgtctttaactgctcatcatagctggcactgctgctgttattttgctgctcgttataagcagacaacgcattctcggcttccgtcaatgcatcctttgctgtattgatctgatcattggcattttgcagcagggaaacattttccgggcgggcattcacctgttcacggattttctgcttgtcctcctgagtcagggtggaattgccgctttcatccttactggcctcttcagccttatcaatctccttccagacatccgcctctatatctttttcgaccccatccagattggtaactgctttatcataagccagctgcttctcctcaaccgtttttttcagagaatcactgactgtcgtatccgtttcaccggaattgctgttactattcttatatgtattataagcgttccaggcctcgttcatatcagatttggcttttgaaacactgtcattggcatccgccaccgtctgattataatcttcataggttctctgaaggctttttgatttcgtatctgccgcaatggcttcattcgctttcttgtcagaggctgttgcctttgccacctgcagttctttctgcgcctgaagcaattttttcttaagatcagctgtatcaagctggatcagcagatctccctttttgacggttttgccctccgtcgcttccacggaggcaatcttaatattggcacttgttgatatggcaatatctttattcggcgtaatattgccgtccacttcaatattatggctgataacaccgcctgttgcagcagatgctgtgactttcgcaatagtcagagaatcagcggctcttgacagaatcgttaataaaaacatcagaataaggaaccccgccagcgctttgacagctttgacctgaagggaactctttttattcttatccatctcaaaatccatcagttgctttaatttcattgtttggtatctcctctttttcacaagtcgatcacttataagactttattctttgacagccgaagctgcaataccctgttccagatagttctgtcctgcaagaaaaacaagcagtgacggaacaagtgtgatcaccgatgccacaaaagccaagcctgcattatccatactgatattcggcaaatagagagacaacggccacaacgtctttgacttcaaaaatgtcagcggctgctcgatcagattccacgcatccagaaaacttaagaccagcgctgagacaatgccggatgaaccaagtggcaccccaatcgacaaaaacacctgaaacttattggcaccatctaattccgccgattcaataatgcccttcggaatacttctgaagaaatgatacataataaatacagggaatgtggaaaatgcggccggcaaaataacggcccactgcgtatctaccagatgcatcgcatccagtgtcagataattcgacagcatcgtgacctggaatggcatcagcataagaatgatatacaggttaaataaaaccttctttcccgggatatcaagtcttgcaaaaccccatgctgcaggcacaccggtcacgatctgtccgagcaaaatcgctcccgtcatcttcacggaattccagaacatcacaaagaattccggcgaatccaaaaggagctgtacataagctttaaaggtcggatatgtcggcagcagtgcccatgaagcaaaaccatcggcttttccaagcacagcccccagataatgattcaattcatccgttcccatcagagaaccgacaatcagaaacaccaccggaaaacagatgataactgccagaaccaaaagcagcaggagtaatattcttttaaaaatcttatgtttcatctcctgcctcctaatcttcacggtcccatgaacgctgcagacccagaatcagcacaaggatcagcaatgcgatcacaactgccgctgcagacattttgtcaagggataattccctaaaccagttgttgaacaaatgctgcagcagatacatactttcatgaggataatcccccgccaccagataagcctccctgaacaccttgaaagaattcaaaaaggccaacaccgtgattgtatacagtgtcgacatcaggttcggcatggtgatataccgaaaacactgaatattattggccccatctgctctggccgcctcataaagggtatccgggatagccgtcagacccgccatccacagaacaacattgtaaccgagatttttccagacgtagctgaaaacaagaatccagaaggcaaatcctgtatccatccaatcctgtgactgcatcccaaacatatgcagaaggccgctgaaatagccattctgatgaaacaaaagccgccagatcagcacaaccgaagccaccgggatcgccatgggcaccagatatgccgttttcagataattggctccccggatgcctgcattcaaaaacactgcgatcagcaatgaaaaaatcatcaggatcggaatgcagatcaccatgaacttgatggtattcgaaaacgccagtctgaatgccgcattctgaaaaatcgtgatgtaatttgaaaagaaaacaaactgcgtacccgatacattcgtaaaagagcggcgcaatacatctataaaggggatcagcacaaaaatgctgacccctgctaaactcggtacaatgaaagcaatatcagtaagttttttcttattcaggctgatcttcataagctttcatacctctttcttattcagataagtaaatatcgatatctttgacaacctgttcgactgcatcatccacagaagtatctccgataatggcattcatactgtccttcaaaatcgttgacaaaatcgtataatcgccataagacggtgtatccagagaatcgatcaggttcttcagctgtgcgatctgatcgtctgtcggccagtaactgtcaacagagatctcattgccatcctcatccgtcataccccaactgcctttggactcattcggatcatagccttctgtgcctgcatccggatcaaccagtgaagcatcaaagcgttctttattcactgggaatccactgtaactgtcaatggccttctgaccgtctacactcagggcaaatgcatagaactctttagctgtgtctatattcttggatttggcattgataccaataatctctgacggaacataaacattctgaacagaacctggcagtgctttgtaattaatgtcggcatcctttctcatgatggatgcgagatctccaaggctgcttgttccggccatattgccgtaggcaatgcgattcatgccggccataatgtacatagccatataacttggatctgagccgtaccaggaagcatccatttcataatcctcacttgcatagtactgcttcatttgatccatatcggacttatctttatctgataaagtttcgtaaaccgcattataaatggtcttaatatcgttcagataggatttcaggctgtcagaatcaagagatccgtcttccttgaaccaactggctgagttgatatacatcatatcgccaactagtgaatataaactataggattcgataaaattctcattcttcttgtgatccttgacaaaatcctgagcaagagaagcgaaatccgacaaattattcagcttgtcaagatcactcttacggccaattacaatcggcacctggaaggtcatcggcactgcataaatcttgccgtcatcacccttataggtctgtgcgatcttatcaaaaagcttgccatcagagatcagcggattcactgtatcactgacatctgcaagtaatcccttttccacataggaattaaccggaagtccatccataagcaggatatccgggccgttgccgcccattacttctgtgttcaatgtacggatggcatcggatgttgtcactgcatcatcaccactgacaccgctttcaaccttcacataaacatccggatgtgccttctggtaagcagcagccagtgtacggattgtataatcatcctttaatgtatagatggtcagttccttatccggacgctttgcagcatctttgtcataagcataattcaggaaagattcttcagacgtatctccggtataatcactgaacttcacaagaatctgtccgtcatctttcggaatcagatactctacgttgccacttggggaaaccagggatgacatattgccatccacaatctgttcggaagtatccttatccagatcgtatgtatagataccctctgtacaggaataataaatcgtatgtccatccttcagataatctgcgatcgtgacactgcccttggaggtaatcacactggccaatgcttcatgttcagctgtcttcttatccgttgctgtatcatattcataaaccttctcgtaatcatcaagcagcagcttgtcaccgcacagatacatattgttgacatagttcatatcatcaaatgtggctgtaatcttgccgtcagccgttgtcacatgatagactgcaccgttataatctgcaacatacaggttctcggcatcctttaacttgagcgtctggataccattggatgcctctgtatcaccgttattgtcgctgtcaccattttcattgatcacaacgccgtcatcctctgtctctgattcagcggaaacaccggaatcagcagaatcatcggtcttcgaaccagtctcatcctcagatgaattatattcataatgctgctccttctggagattcggaatctccatggctatctctgacagcttgccgtcctttgtcagaagataatacttcacagttgaatccacagaagtcacattatccttcgtctctgagtggctctgtgtataaacaaaagccagatcgccatccgcatcaatggtcatattgcccacgtaagcataatcaccattgccgtcatcatctgtattatcatctccgagattcagctgatcaagggctgataaatccatggaagcatccccccatgtcttaccgccgtctgtagaatccttaactgaaaatcctctgtccgaactgtcactgacaattgcacggatcgtaccgtccgacaattgcttcatcgtctgaatataactgtaattgttatcatcctgagattccaatggatctccccagttttcttccacatagcggccctttccgcctgatgtggaagcatcctcaccatttccgcttccgcttcctgagcacccggccaacaagccgacagtcattgcaagtacaagaccgatactggtcagcttcttcattcttttcataaatgcgcctccattcaaaaaataacatttattctctcaaacactttcgatcattaactgtttgaataagtttattatatcagaaaatgtgtccaaaaacagatgtaatttccttacgatttgcgcaattctttacgaaaatcttacgatttgaactatcaatcgtttccaaaatctcttacactggcagcaggcgaacctgctccgccaaagacctgtgtactttctttctggtcatctccaccagatgcagcgatgtccggtccacaaccgttgtctgtacactgtcctttgccgcctcttctctcagcacatccataagcgcctttaaatgctccggatctttcatattaataaaatcgacgatcacaatacctgaaatattgcgaagacgcagctgacggcacacttcctgcgccgcttcaaggttaatcttgaaaaaattttcctccatcttctgtttgccgatggccttgcctgtattcacatcgatcactgtcagcgcctccgtcggttcaattaccagataggcgccggatctcatccagacacgcttctgcagtgctttatccatctgcgcttcaatccccttcagcttgatcagtggataggaatcatccttatagtattgcaaagcttcctcagatagaccccatcggccaaaattttctttcaattcatcataaacttccggaagatccgttgtcactctgcatgtactgccgtgagcaaactttttgatcaactgcgtatacggcgaatctcctgacatcagtttactgaaacatgttctcatgcatgaagttgacataattctattatagtcaacttctaagcgatgcatctcttccccgatcacttctgctctctgtccggaagcttctgtccggatcatccatgccgccccttcgatttcttcacccgaaacaattccggtcaatcgatctctttccgccgtatctttgatccttgcagatatctgaataccggtttttccctttgtcaacacggtatatcttcccggaaaacttaaccgtcctgtcagaaaccaggcctttgtcttcaaattctctttttcaacctgaacaacgatctcatccccggcaacgattttgtcgtttttcttttgattaacaacaaaatgtacagcattatccttcaggggatagtatcccatcacccccggtgtaatctccacaaaggctgcctgaatattctgtacaatatgtttcactttccctatataaatatcgccgactcttacctggcttttcttcggctcaagattcagctcacaaagtgtgtcttcttcataaagggctgtcagtaccttcgactgccagcccgtaataacgatttgtcttttcatttattctgcaaagtcctccagcgagacaagctgtctgcccgtctgctcatttcctttatctgcatacatatcacagcgtgtcaccaaccacgcataatcattctcttcaagattttccagacggcaaagtgtctgcatgacaagttcaggcttcaggttcgttgcactgcctgctgccacctgcataaagatcttcccattttcttccacaaccatcttgtagatcagaggacgaatgtctatttcccgctcgctcttctttgtcttcttgatgacccggatttccggacgggacataaagctttcaacagctgccttcagctgcttggtctcacaaggtgccatctcttcacggaagcctacctcataatcagctgccgcaatgatggacatagcattcttcgcctgatccggcaaatggcgaatactgtaaacaacaatgccttctaccatctgggcattcacagcattcttcatggcttccaaatcgtcaaaactgttcacttccatgtccagatattctccacgactctcaagtccgacccccaacggtgacgcaaaggacagacatggatggggatggtaaccctgagaataagtgatatctacattggcccttctgaatgccttctggaagtaacgcataatgtccaaatgcccgataaactttacaattccttctttaccaaaccgcattctaagcttcatagcagacacctccttcataaacacgacagccgcagccggaacatccctgacggcagttcggtgtcacaacgccttccttggcccgttgatattctcgcttcaaaaattccttggtcacaccagcattgataaaatcccacggcaggatctcatccagcggacgttcgcgatgcacgtagaacgtatagtccacatggcagtcctcaaaagctttcatccagccttcataattaaagaactcagaccatgaatcaaagatacagccattcctgtaggccgccatcagcaccttgccaagccgtctgtcgcctctggcaaaaatgccttccagtttcgtcagttcaaattcatgccagttataccgcatgctcttatggttaatctgttccttcatcttcgcactcaaaaacttctgtttcgccacgaattcctcatccgtgcactgacgcacccactggaacggtgtgaatggcttcggtacgaagaaagaagtacttgccaccacatccacacggccattacccgggcgttcacccttcggaatctcatagaacgtcttggcaaccttattcgccagatctgcaataccggcaatatcctcctctgtctctgtcggaaggcccagcatgaaataaagtttcaccctgttccagccgccggcaaatgcatcagctgcacccttcagaatcacttcctctgtcaggcccttgttgatcacatcacgcattctctggcttcccgcttccggagcgaaagtcagactgctcttacgtacatcctgcactttggacataacatccaaagagaacgcatcaatacgcagggacggcagagaaatgttcacctttctgttctcacaggtctggatcagataatctgtcaatgcctccagttcagaatagtcactggaacttaaagagctgagagaaatctcatcatgtcccgtggcattcagcatcttatccgcatgttctttcagataatccagttcacgctctctgttcggacgataaaccatgcccgcctgacagaaacggcagcccctgatacagcctctctggatttccagaacaaccctatcctgtgttaccttaataaaaggaactaatggcttctcaggatagcggacactgctcagatcggtcactacctgtttgtcgataattgcaggcgcacatgaacgattcggtccaaaggatgcaatggtaccgtcttcattgtaagccacatcataaaaagccggtacatacaaacccggaattgcagctgccatttcaaggaactgttccctgctgccccctgccgccttattggctttataagcatccatcagtgcatcatagaccgtctctccttctccgatatagaaaatatcaaaaaaatctgccaacggttccggattatacgcacaagggccaccaccgatcacaatcggatcatcctcgccacggtcagccgccaacatcggaattccggacaaatccagaacctgcaaaatattggtatagcacatttcgtactggatcgtaatgcccaaaaaatcaaaatctttaatcggatcctgtgattccagcgcaaacagcggaatctgcttcttgcgcatcacttcatccagatccatccatggggaatacacacgttcacagtacacatcctcccgggcattcaacagatcataaaggatctggatacccagatgggacataccaatctcatacacatccgggaagcacatggcaaaacggatcttcccttccggatccttcaccacatggttcacttcattgcccagataacgggccggtttctcgatttttaataaaatatcatcacttaacgctaacttcttcatgctttttatcctttttttactttttacaaatacagttgttcttaaaatcctccagagcatttactccgaagaagcgacaacctgaatccatattactacatgagcgtggcattgtcaaaacttctttactgtccaaaccattttgaatgaaccattttgtccaaaccatttatcgaagctggccttaggtatccgacagctatttctaatgcatcttgggcaattacccgatcagttagccgaacagtaactttgtcatgtatcacttctgaaaaataggtgcgccgtaagacatactgcaaaaaaacaaaaagcagctgcacaatgacaactgctttttgttttaaagggagaaaaaatatagtaacaaatatagattaattacgtatattaatagtttgtacactaattatatgtctaacgaagcattttgtcaatcatgcattttatccaaacttagtatactaattatgtgcattttcgccaatatgtcggctattcagttgattcaccaccggtgtcacaatggttgtctcaattttctcctttaattgctccacatctgtctgtctttgaatttcagccatcgctgacgcatacacacggtttccgcttaacacatctgtctgcttcaaaaacatcgtcactgacaaaatcagcagcacaatgatcatccgcattgaaaaactgctgcttttttcagtactgtcccggacaatagaatgtttctgtttcttatccaactgtctgagtcgtctgtaattacttttctgtgctgcttccatttcaaagtaattgtccatataaaaagctccgtctttttgtatcatgatacgcagacggagccttctttatacctgtattcaacttttcaatattttacaaacatccttcccctgcagctgccattaatgaactatatcgttcttctcagacaaatgaatcagaaaatctgcatcaattgttctgaaatcatcaatcactacattcgcctttgacagatcctgttcaccggatgtagggttctgatagcccaggcaggtcattccggcccgtactgctgccaacacaccattggctgaatcttcaatcacaacgcaggtctccggcgtctccttcagtttttcacatgtctcaagaaaaacgtccggtgccggcttaccgtttttcacttcttcacccgaaaaaatcagatcaaaataagcgacaattccaagcttttccaaaactgcatgaataaacggataggaggaagaggatgccactgctgtctttaaaccggcggccttgatgctcttcagcaattccactgagccagcagtaggtccggcatcgctttcccggacaaggcggatcatgatcgcctcacgctctgcgatcagactgtcgattgtctcactgaggtgatatcgctctttaaacaactcaaatctcagctggttcgttgtgcctgcataggctgtcatcgcttccaccggcacatccaccccatgagcagccagcgtttgctgatcccctagataatgcatcggctgactgtcaatgagcaccccatccatatcaaatataatcgcatgtaccattcttgtcattgcctcttaattgcagtaattcttgaattctttgagaacagtcagcaccaggttgtatgtcctctcaacagaagcaatacccaggcgttctctcgatgtatgaatatcgtgcatttcagggcccatgctgaccatatcaagccaaggcatcttctcggacagcaaaccacattcaagtccggcatggatcatctcaatagatgcctcttcgcctgtctgtttctcataaatcttcttgcagagtgcacagattttggaatcagggttaaatggccattccggatattcgccacggaaagtcatttcgccgcccagaaattctgtcatatatctcagcttatctttcatcagttctttcagggacttcacagaacttctgatggcccatgtcatggcaactccctcttccgtcgtctcaagaactccgagatttaatgaactttcaacaaggcccggcaaatctgcgctcatcgtctggatgccgtttggcacctgcatcagcataaaaattaccttctcagtcaatgccatagagaagacttcatagcctccctccgcacgtacatccgcatcaatggcaatcaccggatcacacacatggaactcactgcgcactttctcctgaaaagcagctgccagagactggatctcatcgatgtcttcatcagataccacgatctcagccttactatctacaggaatcgcattgtccttgtctccgccatccacagaaataatacaaaatggcagtgcttcatgcagttcaaacaacagtctgccaagcaaaatgttcgcattggcacggcctttatcaatctctgagccggaatgtccacccacaaggccatggacatgcagtgtcattgccgttccctcggcagaagcacagctcatcggaagaaacgatgtggctttcacaccgccggcacagcctgcaaggaaatgcccttcatcctctgaatcaagattcaaaaggtattttgccttcagatcggctgtatccagtgcaatggcaccttccatgcccacttcttcttcagttgtaaagaccacttccagttccggatgttcaatcgtattatcctcaagaattgccaatcccatggcaacggcaatgccgtcatctccgccgagggttgttccctttgcatggacatatccgtcttcaaccaccaggttcagtccatccttctcaaaatcaaaatccacacctgcatctttgacacataccatatccagatgtccctggagcatcagaaccggcgcttcgccatagccttctgaagccggctttctgattacgacattgtattcttcatcctgacgaacctcaagattcagagactgtgccacagaaacacagtaatcgctgatggctgctacattgtaagagccatgcgggatcttgcagatctcctcaaaataataaaaaacgcgttccggttttaaaccttctaaaactcccatttctatctcccaaaataaaattaatttttaaaactgtgaattggcgccggaattctgccgccgcggttaatgaaatccgaacagtcaaattcattcactttcataatcggtgcataaccaagcaatccgccaaattcagctgtatcgccgactttcatgccatgtaccggaatcagtcggaccgcagttgtcttctggttgatcataccgatcgccatttcatctgcgatcataccggaaatagtggttgcctttgtatctcccggaatagcgatcatatccagaccaacagagcatacacatgtcatcgcttccagtttctccatggtcagtgcaccttccagtacagaatcaatcataccctgatcctcagatacaggaataaaagcaccagacagaccgccgacataagaagaagccatgataccgcccttcttcacctgatcattcaaaagggcaagagccgctgttgtacccggtgcacccacgcgctcaagacccatttcctgaagtatctcagcaacgctgtcaccaacagccggtgtcggagcaagggaaaggtcaataatgccaaacggcacgttcagacgtctggaagcttcctgggcaaccagctgcccaacacgtgtcaccttaaaagctgtcttcttgattgtctcacagagcacaccgaaatcctgacctttgacttcttcaatagcacgtttaacaacaccagggccactgacacccacgttgatgacaacatctccctctgtcacaccatggaatgcgcctgccataaatggattatcatccggtgcattacagaaaataacaagcttcgcacaaccaagagaatcattgtcctttgtcagctctgctgtcttcttcacggtctcgcccagcatcttgacagcatccatatcaataccggtcttggtggaacccacattcacagaactgcagacgagttctgtctctgccaatgcctgagggatagattcaatcaacagcttgtccgcaggtgtcatgccctttgaaacaagggctgaataaccgccgagaaagttgatgcctactgtatgagctgctctgtcaagggtcttggcaatcttcacataatcttccggtgtcttgcagcagctgccgccaaccagtgcaatcggcgttacggaaattcgcttattgacaatcggaataccataatccagctcaatctgctcaccgaccttcacaagattcgctgccttctcagtgatcttacgatatatcttctcacaaacaacatctacattattatcacagcagtcaagaagactgatacccattgtaattgtacggacgtccagattggactcctcaatcatcttgttcgtttcccgaacttcaaatacattgatcatttatcttacccgcctttgttaaattctatgcatgatgtcaaaaatctcttcgtgctgcattttgatctgaacaccaagatcttcaccgatcttctcaagatccttcaccaatgaggcaaattccttatctgcaccattagcatctacgatcatcatcatatgaaaatagccctggataatggactgatcaatatcaagaatgttgatcttatgctccgcaagatatgtacatacggttgcaataatacctaccctgtccttgccgataactgtaataattgtcctgttcatgattcaatacctccgttttataatgtgataagagcccttgcctcatctcttggggcaacgctgatatgcagcgcttcttttgtcactgaaaaatctctttccaattcattctgaacggctctgagcgcaagctcaggaaaattgttctccttgctcaagtgtccaaggatcacctgctgcagtctctcattcaggagtctgccgaccagctgaccggacatctcattgcaaagatggccataattcccggcgattctgcgcttcaactgatagggatatggtcccacttcaagcatatgcagatcataattagcttccacatagagcagatcacaatccttaagctcatcgatgatcgcctcatcaaaataacccaggtccgtcactgtcccaattcttgcatctgccgtttcaatctgatagctgacaggatcccttgcatcatggggaatagaaaaaggatggatggtcatatcgttaatctggaaagtctctcccggccggatcacatgaaaaagggattcatccaccttgccaagtgacttcgtccgccatatttcttccaatgttcctcttgtcccataaatcggcacatgatactttcttgaccagacaccgattccctggatatgatccatatgttcatgggtaacaagaagtgcatcaatatcagtaccttctgtgccgaaactcttaagtccctgctcaattctcttcttactgatacctgcatcgatcaaaatatgtgtatcatcatttgctgcatacagacagttgccgctgctgccgctggcaattgttgaaaattgcatgcatctcatcctctcatcgtaaaataataactttcaagttaaacgcatctgtgcgcagaacttttatactaaattataatccatcgacattttaaacgcaacatttattttgtattagtacagtaattcatcaaagtacacaaacggctgccaaaggcagccaaaacatttcatcattcgtgcatttattgttgatccagcttctctttcaactgagcatacacatccgacaatgttgtgttattcttaatcacaaaagaacattgctcaaaaaaggcctcatccggctgctggtttctcatcaccgaatcaaccttctcatcggagtaattccttgtctccttcatgcgctgtctgcggatctccggtttcgtatacacataccagaattcatcacagatatcttcatatccgcattcaagaagaatggcagattccaacgccacaaaacgacactcaccggaagcctctgcctctgcgatcaactttcgtatctcatcctttacatacggatgcgtcatactgttcaacttctccagggcttctttgttgttaaaaacatgatcggccagcttctttctgtcgatttcgccgtcatccatcaaaatatccctgccaaaatattccacgatcagctgatagctgatattgcccttctgcatcagttctcttgccacttcgtcagacataatcacacatcctccgaaattctgctgaagcattttgatcacttcggatttacctgtaccggcaccgcctgtaatgccatacaccttcatttgtacatcccccttttctacgtcccggatttattttaactcataccagttatgaccggtatgcatatcaatctccaacggcaccgccaatgtcactgcatgttccatttcttccttcaaaatcgccttcactgcatccacttcatccaaaacggcctcaatcagcaattcatcatggatctgcagaatcagcctggacttcatatgctgccgtttgaggcgtctgttcactctgaccatggcgatcttgatgatatccgctgctgttccctgaatcggtgaattcatggcaatacgctcaccaaaagaccgctgcataaaattacttgaaagcagttccggaaccggacggcgtctgccgaataatgtcacggcgtatcccttctcctttgcatcttccacagaacggtcaagaaacgccttaatgcccggataggttcggaaatactgctggatataattctctgcttccttcttggtgatactcagatcctggctgaggccaaaggaactgataccgtacacaataccgaaattaaccgccttggcattgcttctctgagccggcgtcacttcatcgaaaggtgtgtggaacacctgggaagccgtcatccgatgaatatcctgggcctctttgtaagcctggatcagatgttcatccccggccatatgggcaaggacacgcagctcaatctgtgaataatccgcattgacaaagatacagtcttccttaggtacaaaaaccttgcggatcagccttccaagctccatacgcaccggaatattctgaagattcggttccgtactgctgatacgtcccgtcgctgtaatggtctgattaaacttgccgtggattctctggtcatccggccggatataaccggccagcccatctgcataagtggatttcaatttcgtcagctggcggtattcaagaatctgccccacgattggatcataggtacgcagcttttcaagaatatcggcagacgtagaataacccgtcttcgtcttcttcgcaaaaggcaatcccaacttctcaaataaaattatgcccagctgcttaggtgagttgatattgaaagattctcccgcaagctcataaatattcttctccagttcatcaatcctgcctgtcagtcggctgccgtattctgcaagggcgtccttctcaacagcaatacctgccttctccatatcatataaggcatataccaacggcatttcaatctcatcaaagagccggtccatgccggtctcctcaagccgcttcttcaaagtactatacgcctgtacagggatcatcgccgaatacgcaagataatgtccaaaactctctttttctttctccgatgcttctgtcaacgtcatcttcttcatccaatccgctcttgaaggcactgtcatgccaaggaaatcttgtgcaataccgtcataggtatagctgtcctttaacggattgatcagatatgccgcgatggccgcatcaaaaatgccgtcctcttccgaaagctccaaccagtacaactgcggtttcacatcgatcatgcagcagacaccggctctcttcgccgccgctgccgccatctcacgaagaactgctgctgtcatcatcccttccgccggaatataaacaggcatattgtctgctttgcaggcagccagaccctcaaaatcatcttctgagaaataataaagtcccagttgatctgtctcaccaattccctccagccaggaaacagccgctgcaaaatcatccagcacctttactgtctgataattcaccgttgtttctgccacactgtcaaaacgcttcagaatattcttcagttccaaccgcttcaaaagggcataggatgcatcgttcatcatctgcccgatggcagcatcttccagtttgaaatccagcacacaatctgtcttaatggttgccagaaccttgctgaactgcgcctgttcatagtaagtgaccagattctctgaagccttcttcggtttcagttccgctgcatgtgcatgagccgcttcaatactgtgccacgtactgatgatcttcgatgccgtcttctcaccaatgccgggaacacccggaatattatccgatgtatcgcccatcagtgctttcatgtcaataaattctgtcggtgtgacctgatatttttcaaagacatctgctgcataataatcttcgatctctgtacctgacatcttcgtcttcggaatgcggatcttgatcttgtccgttgccagctgaagcagatccctgtcaccggatataatggacacatcatatcccgccgcctcataagctttcccaagcgtaccgagaatatcatccgcctcataaccggcgtgttcaagggtcggtatctgcatggcatgcagaacttccttgatcaccggaacctgctcccgcagttcctcaggcatcggttttcttgtccccttataagcctcaaacatctcatggcggaatgtcggcgcatgaacatcgaaagcaaccgcaagataatctgctttctcttcatcaagtatcttaaacataatattcaaaaagccgtaaactgcattggtatgcagcccttctgcattcgacagcaacggaatgccataataagctctgttcaaaatgctgtgcccgtcgatcaaaatcactttactcatttaactatcaattccttttctatcatattgccgccatccggcaaacctctttgttcaactgaaaaaccggccggaaggattaccggataatgctgttcaaaatataaccgtcccgaggatacatccgacgtctccgaaatatctcccatatcctccgtcactgcatccttaccaaaccagaatgcatagagggatgcagctgctgcgtccttgaaatcattcagtgtatggatctcctgctcactgaacagcagcgtatgactgcagaatgcgagaatcactgccatgataacaatgccggcccgcttggcaaaatgccgccttgccgccaggcgctttctcatataaagttctttgttctgttcactgataaaatctttcagattcttcttaagatccattgtccctgtatgatcttcatccagctgcatcaaaccaatggtgatcatatagtagacttccagttcatcataacagtcctggcagttctcaatatgctcaaggaaaccttccagctgctcatctgtcaatttctcttcaataaatcccgaaatcatccgttgtacatcatgacacttcaccctcgattccccctttcatctgtctggtaatactatacactattttttttaaaaaataaagcatcccattttttatttgtcctctgtgattcccttgacattctcatcatttcgatatatcgttatatcagaatactaaacagaaaccgattcatcctgacactttatgccatgatgaattttttatggaggattttatgatagatggatttaacagaacaatcgattacatccggctttcggtcacagacagatgcaacctgcgctgccgttactgcatgccgcctgatgggatttcctgtctgcctatgcgtgaaattctcacttacgaggagattgaacatctctgccgtattttcgcagaccttggcatccataaagtcaagattaccgggggagagcctttcgtccgaaagaatatatgccatctgattcgtcggatcaagcagatccccggcattgacagtgtcacactaacaaccaacggcacactggcactgcagcatctggaagaattgaaagccatcggcattgacggcatcaatttcagtctggacaccttgaaaccggccgtttttcatcagatcaccggcgaaagtggcctcgaaaatgtccttgcagccatcaacaaggcggtttctcttcaaatcccgaatatcaagatcaactgtgtccctgtccgtgatttcaatctctctgaaatcccggatatcgccgctttagccgaagattatccgattcatgtccgttttatcgagatgatgcctatcggcctgggcaaagattttcagatgatttctgaagccgaggtctgtcatctcctgaaggatacctacggcagtcttgaacccatcgacggcattttcggcaatggtccggcacattattatcacattccgagattcaaagggcatatcggttttatcagtgccatgagtcatatgttctgcgacggatgcaaccgtattcgtctgactacagacggacagctcaaaacatgtctcttctatgaaaatgggattgatctgaaatccttaataagaaacaactgcagtgatgaagaactgaggcagcaggtctgccttgccctgcagaacaaaccacagcaccacgaaatgtccagcctgccgccggagcttcggggtatgtcacagataggaggataaagaatgtacaatgttgctattattacagccagcgataaaggatacgccggcgagcgcgaagataagagcggtcagactattgaagagctcgtcactgccaaagggctgcatgttgctcataagatcattcttcctgatgaccgcagcatgctggccaagcagatgatgaccttatgtgatcagaacatcgatctgattctcacaaccggcggtaccggcttctctaaaagggacgttacaccggaagccactgctgatgtcgttgaacgcagggctgacaacctcactttcgccatgattgccaacagtctgcaatataccccaaaggccatgctctcccgaggcattgcaggtatccgtggcaacacactcattgtgaatcttccagggagtccgaaagccgtccgagaaaacctggaatacgccatggatgcgattattcacggtgtgaagattttaaagggcgatgacggcgaatgtgcaaggcaataaaatccagcatcaaaaaaggaatgactcacatgactcaaaatcatgagaatcattcctttttatgtagagttcaactcctataaacaaagaaaaaacgctgcttaaacagcgtttctaaaataataaagtaccggtggtcggactcgaaccgacatggattgctccgcatgattttgagtcatgtgcgtctgccaattccgccacaccggcatatgatatatgccacagtcatgcaactgcatcccacaatcatcaatgtggattctggcaataaaaaaatagcccgtaggggaatcgaacccctgtttccgccgtgagagggcggcgtcttaaccgcttgaccaacgagccatttgctactctgctatcatacactacttttaaacaaaatgcaagccttttttttaatttttttaaaaaaatatatttttctaactttaaagactttttgacagcagagtgtctgtctattctatgccatccgacaccttgtgtcaatgtttcctacataaaatacatttaagatagcggctgaatcaggatatccatcacaccgccgcagacaaggccattttctgctgcttcccgacctgtcatatctacatgctccatcagacagatattctcccgaatacaatagcgcgcttttgagataacttccgcctctgcgcagccgccgccaatggtgcctatgatcctgccgtcttccagaatgatcatctttgtcccagcttctcttggcccgcagccctttttgacgatgatggtggccaatgccatcctgaccccttcctcaggttgagacagcatctgttgcatctcagaagaatagcaatacttctctttctgagttcttctacactcaataacctccgcaatgatagagacagcgatttcctccggtgtcatcgcgccaattttcagaccgatcggcatgtgtacactatccagaagggccgcatcatagccttcctctaaaagtcccgctttcagattcttcacccttactttgcttcccatcattccgatataactatggcgtttgccaagaataacatgcatacagtccacgtcatactgatggcctcttgtcacaataataaaataaggctcctggtgatcatccattctctcaagcgcctgcctaaaaggttcacagatcacttcatctgcgccagcttcccttgccttgttgcagaaaaccggccgatcatcaataaccgtcaccttaaagccaaccattttcgcaagccgaagcagcgcaatggatacatgcccggctccgcagatcaccatctgcttgccgctgcccaccttctccataaaaacaaaatgatcattggccgtcggaccgatggacatatatcgctcaaaataatccggatccgccacataatccagaatcatctgttcagccttctgtcgtcgttcatctgttgcattcggcaaatacagaccaacagggtgctttccctctaccaggactttcattccaagcagttctccatcaacaacagttgcctcataacagctctgatttcccaaaatgcttttctccaattgctgatagtactcagcagtggaatcaaacttcacaatttcattcaatacttgctctttcatttcaatcccctatatcgatttaaaaaatccgaagtgatcatcccggtcttccgtcgatcactccggattctttatgtacgcttttcgtcttaccagttggttgcaatatctaactgtgtagggttcgatgctgcaaaacttcccgtatcacagacaagacatgttcccagggaactcgctaccgttgtacctctagggaaataattcagattggctgcacacataatatatgaaccaagcatcttacagccgtcatctctgacccaatatggataatcttctgcagaaaatcccatatcccgcatgattctgacaacgccgctcatatccaggttgtaatatgtctccttacccgtcggtccatagacaacaccatgatacttggaaagaaccttgccatcagacacataggaattgtcattgctcggtgcttccgtctcaggcaccttggtctccggtgcggatgtctccggtgtcttcgtctcaggcgcagacgtctccgtcttcgtggactccgtattcttcttcgtggatgtatctgtcttcttcgtagaggaatcggacttcttggtatctgtattcttcgacgcttcctgcttcacagccgcttcatgctcagccttggccttggcagccgccttctcttccgccagaatcgatgccatcttgctgttctgggcatcaatctgtgactggatatccgaaatatcagaataggcagcacgcatgctgtcatccaatgaggacaattcattctgtctctcgtccaggatggtatccaactcactcatctgctgttcataagaatccttgtccttggtcaggctgtcctgtttctctccaagttcctgctcataagcttgaatctgtttcgttgtcgcctcaagagaattgtaaagttcataatcatacatattgattcgtgacttatactcctgagaattcaaaacactcttcaaatctgcatccttcagcagaaccttaaaaaatgaagcatcctcttccgattcataaatggccttgattcgtgccttcaacgcctcatactgaatctcctgatttgcttccgcctctttcaaattcgcttttgtcgttttaatctcctggtctgtctgctcaatctcatcagaaactgtatccagtgcagataaggtctctttaatcttggtgtccagttccgctatgtaagactcaatgctcgttttattcgctttcatgctggccagttctgattcaagctcagatgcctgtccttccagactgttgatctggctgctcacatctgatttggaatccgcaaaagccggcatagccattgcaaaacataacgcaccaacaaggatgctgcctgcaattcttctgctctgtttcactacatagtcctccttttaatttgttcgaccaatctattatagcacttttgaaagactattacaacattatgagctaattattacgtaattgtttcaaattaaccattttttactaaaatgtgtttttaaaaattcaattttgataattttgtttattttttcactatcaatcttataatctcttctacaaatttattcacaatctccttatagaatcgccaaagtatactcaatgcatcattattatacctataactttgtttttagcaaaaataattattcaaaaaatggcctgattaacggccatttttgcatcataataaccttcaaaatttatttgttaatatacaattaccccaatctatgatatgatgaagataaaaatttggcagaaaggagacgaaaatggacgataaaaatccgatgattgacaaaatgcagaaagcgacgaccgaattatttgttttaagtgcccttatgacggaagacatttatccctatcggcttacaaaggacatcaaagcaatgactttcggcttaatagaatatagcgaagctggtctgtatcccgttatcagtcgattactcaacgcccagatgatctcctcctacactgttgcgcttgaaaacgggcgaaaccgcacgtattatcatattgaagacaaaggccgggcacactggcgattattaaaaaatggctatgaccagtttattcgtatttcttatttgatcactgaaaaaaacggcgattaaaaatcgaccctttcggaatattccggaagggtctctgaattagccgcaaaaatttctgtataagtatcaccacagtttttgcatgtatatttggtaattccatcttcgatacatgttggcattctttcattcatatattttttctatgcacggctttctttatactcggcgatgacagcttttaccagattttcgtctgcatctgcccattttatgatattctccattgagacaccgtctgcatacatattcaaaataactacttttttattcgtccgctcgccttgctgtaaagtgtaccccttgtcaaggacaaattaagaagaagggatttgttctttctagccagtagatggctatatcagtttgtagtttagttcgaaggtcgttctcagagcggagcgaagagaacatacccgaaaagagccagagttaagagagcggttctaagaggcagagtgttttatgatatgcagttttgaaggtatgtaatataaaagagagagaccagaagtcacaagatttctggtctctttttgtgcaatatgcgaaaattaaaaatttatcaatttacttattgacacgaatagttagctagtatataattagctcacaaagtattagtaagctaaaaatgaagcgagcaaatgaaaggggttaaatgagatgatagggtttaatttaacagaagaacagaaagagatgcaggcatttttccgtaagttttcacaggaacgtgtgaaagcagctgcagagaagatggatgaagaagagaaaatggatatggatctcatccatgagatgcagagccttggtatgtttggcattccattctcagaagaagttggcggtgcaggacttgatgttttcaactatgttcttttaatggaagaactttcaaaagttgatgccagcacaagtattacagtatctgtacatacatctttatgtgcatccagcattgaagaatttgcaacacctgagcagaaagaaaaatggcttcgtccactggctgacggcagcaagattggctgtttcggtttaacagagccagatgcaggttctgacgttgcaggcgcaagaacagttgcagttaaagacggtgatgaatatgtcatcaacggcagcaagattttcacaacaaactccggattcgctgatacattccttgtatttgctttaacagataaggctgcaggtcctcacaaaggcatgtctgctttccttattgacagaaatacaccaggtatcacagttcagccggatatcaaacgtatgggtatccgcggtgcttctaactcagaagttgtttacacagatgtacgtgtacctgcttctgatttacttggcggcgaaggcaaaggcttcaagatcgctatgaaagcacttgatggcggtcgtatcggtattgctgctcagtctgtaggtcttgcacagggcgctttagatgaagcaattgcatattgcaaagagagaaaacagtttggcaagccaatcacagcattccagaatacacagttcagaattgctgaattacaggcaagaattgatgcagctcgtcttcttacatggcgtgcagctgttgctaaagacaatggcgaaccttacaatgtatatgctgcagaagctaaactggttgcttctgatgtagcaaatgatgtttgccgtgcagctgttcagttcatgggtggctatggctactgccgtgaatacggtgttgaaagaaagcttcgtgatgtcaagatcacagagatctatgaaggtacatccgaagttatgaagatggttatctctggctctttacttagataattgtcggttgatagaataataacgaactccctaaatgtttaaaagtataagtgaggccggccagtcatgatgattggccggttttgttttgttaaaaatttgcttttgttgaaaaacttttcgaataattgtaaaaattcacaaaaaatacttgtataaaatagccttatgaggtataataatacaagaaaatgaataggatcttcagggcagggtgcaagtccctaccggtggtaaagcccacgagccgcaaggttgattcggtgcgagtccgaagccgacagtatagtctggatggaagaagataaattgacgtaagtttgtgactgaatttattgactgctctggttagtatgtattgaccagagcatttcttttgttatagcattgtatgtgcctgagtgtacatacaattgtgttgcaagttgactgcgcggtgcgcaattgagtgtaagctatggtgcctctgaagaatagattcaggggcattttctggtttcacgggcattttcccgtgaggcaaaacgtagatgataaggggttggagtaaatgacagacagaaatcaggaagatttacgttatatgcagatggcgcttgatatggcaaagcttgggcgtggctatacaaaccctaatcccatggtgggagcagtgattgtcaaggatggacaggttattgcaaaaggatatcatcattgctgcggacagggacatgcggaagttgaagcatttaaggatgctggaaatcaggatgtaactggagcaacgatatatgttactttggaaccatgttcgcattatggtaagacgccgccttgtgcagataagattattgagaagaagatcggacgggtagttgtcggtgcacttgacccgaatccattggtagccggacggggaattgagaagattcgcaatgcaggaattgaagtaacaactggtgttcttgcagaagaaagtatcaagctcaatgagatctttatgaagtatattgtgaacaaggaaccttttgtattgtataagtcagccatgtcattggatggaaagattgctacggcaagcggtgagtcacagtggatttcctgtgaagcatcgagaaaggaagttcatgaactcagacaccagtatatggccattatggtaggatcacagacggttcttgatgatgacccgatgctgaactgcagattaatagaaggcaaagatccaatccgtgttgttgtggattcctcattacggattccgatgacagcacgtctggtgaaaacagccagggacatcagaacgattgtggcatgtacgccgacagcagatgaaaagaagattaaagatttgcagaatgcaggtgttgaagtattgatcattgaagcgaaagatggacatgttgatcttaagaaattgacggaagaactgggacgtatgcagattgacagtattttactggagggcggagcagctttggcagcagcagcctttggagcaggaattattgacaaggttcagatgtacattgcgccgaagattatcggcggcaagacatcaagaacacctgttggcggcaaaggtgttgaacatctttcagatgcctggcagcttgaagacataacagcgagaaatataggcaatgatatatgtatcacgggctatatcagacgggaggcatgatatgtttacaggtattatagaagaaataggaatagtgaaacagcttgttccgggaaaggtatcctatcggctgactgtgagtgccaataaagtgctggagggaactcaggttggtgacagtattgctaccaacggcatttgcctgacggtaacagcgattcacggcaataattttgatgcggacgtcatggcagaaactgtcagaagaaccaatttttcatccctgcatgcaggaagccgtgtgaatcttgaacgtgccctgacaccgatgagtcggttgggcgggcatattgtcagcggtcatattgacgggacaggcacaatctctgatatgacaagagaggataatgctgtctgggtaactgtacagacaaagcctgatctgctgaagtatatgatagaaaagggttctattgccatagacggtgtgagtctgaccattgcctatgtggatgacggctgctttaaggtatccgtcattccacatacaggtgaagaaacaattttattaaagaaaaaaccgggagacaccgtcaatcttgaatgtgatctcattggaaaatatgtcgagaaattgctgtttggtaaggcagaagaaacacagaaatcttccggcggtattacagaagcatttctggcagaaaacggatttatgtaggaggaaacaaagagaatgaaggaatttaattcagtagaagaagtcatcgaagccgttcgtggcggcaagattgttgttgttatggacgatgaggatagagaaaatgaaggggatgtcatctgtgcggctgaatttgcaacacctgagaatgtcaactttatggcatcttatgcaaaaggcttgatctgcatgccgatgcatgttgattatgtagaaaagcttggcctggacatgatgtgctccgttaatacagataaccatggaacagcatttactgaatccattgattataaagacacaacgacaggtatttctgcttttgagcgttccatgacagccatgaaggttgttgaagatggtgcaaaaccggaagatttcagaagaccggggcatatgtttccactggttgctaaaaagggcggtatctttgaacgtccgggacatacagaagtgacggttgatctgatggagatggcgggactcaagaaagttggtctttgctgtgaaatcatgaaagatgacggcacaatggcaagaagagatgatctgatggcatttgcagaagaacatgatttgaagatctgtacaattgcgcagatcaagcgatacagaaaagaacatgagaaactggttgaatgtgtggcaaaggcaaaacttccgacaaaatacggcgatttcatgatgtatggctatatcaacaagctgaatggtgaacatcatgtggcactggttaagggggaaatcggcgatggcaaggctgtattatgtcgtgtccattcagaatgcctgacaggtgatgcgtttggctcccagaaatgtgactgcggtgaacagcttcagacggcgcttcgtatgattgagaaggaaggccgaggcgtattgttatacctcagacaggagggccgaggcattggtctgatcaacaaaatcaaagcttatgccctgcaggatcagggatatgatactattcaggccaacattatgcttggtttcccggcagatatgagagattatactatcggttcccagattcttgaagaccttggcgttcatgaactgagactgatgaccaataatcctgagaagattgatggtattgcggcctttgatctgaagattatcgaaagagttccaatccagatggaattaggcaaaaatgatgctttctaccttttaacaaagaaagaaaagatgggccatcttctgacatatccggtgacactggaagaggaagagaatgccaaaaaggacaacaaagacaacaaataaattaattatttataaatgaaaggaagtatagagatgaacgtattagaaggaaaattagtagcagaaggaatgaagattggtattgtgtgtgcacgttttaatgaatttatcacatccaaacttctcggcggtgccatggatgcacttgtaagacatggcgttgcagacagcgatgttgatgttgcatgggtaccgggagcatttgaaattcctctggctgctcagaaaatggctgcaacaggcaagtacgatgcaatcctctgcctgggtgctgtcatcaaaggttctacatctcattatgattatgtttgtgcagaagtatctaaaggtattgcaactgtttcattatcatctggtctgccggttctcttcggtgttctgacaacagataatattgaacaggcaatcgaaagagccggtacaaaagcaggcaataagggatatgatgtggctgtcagcgcaattgaaatggtcaatctgttcaaaaatctgtaaaaattcggttgattgtacagcgtaatgctatattgactaaaaatacccgtcaaatcaatttgacgggtattttttgcattcaatctgcctatgaaaaaaagaaaaatgatcaaaattgttgttcaatctgcaaagaaaagctaaaaaaaagaaaagtcaacaaagatcccggagtttctttggccaaagcatccatggccgttttaagaaaaatgttgtagtatagtaacagttactatattattgaagcggctgaatgccgataacgaggaggaacttatggcaagtttatcattaagaaatatttataaagtttatccaaatggttttaatgcggtaaaggattttaatctcgaaatagaagataaagagtttattatttttgttggtccttccggctgcggtaaatcaacaacacttcgtatgatcgcaggccttgaggagatatccaaaggtgaactctacattgatgacaaactggtcaatgatgttgaaccgaaagacagagatatcgcaatggtgttccagagttatgctctttatccgcatatgtctatttatgataatatggcatttggcctgaagctgcgcaagatgccgaaagatgagattgacagaagagtcagagaagctgcaagaattcttgatattgaacatcttctcgacagaaaaccgaagcttctgtccggtggtcagagacagcgtgtggctatggggcgtgcgattgttcgtgaaccgaaagtattcctgatggatgaaccgctttctaatctggatgcgaaactgcgtgtgcagatgagaattgagatttccaaactgcatcagagactgcagtctacgattatttatgttacccatgaccagacagaggctatgacattgggcacaagaattgttgttatgaaggatggcgtgattcagcaggtggattcaccgcagaatctttatgaccgaccagacaatctttttgtagccggttttatcggttctccgcagatgaactttattgatgcaacagttgttaaagagggcggtgagctgttccttgaatatggtgagcaccacagagtgattctgccacctgagaaagcagcgaagctgacagattatatcggcaaagaggtcacatttggtattcgccctgaggatgtttttgcagcggacaaatatgaagctgcccatgaacataatacagtggaagcaagtgtgcgtgtgtttgagatgctgggtgcagaagtattcctgtatctgacggttgatggatttgatgtcacatgccgtgaacatccgagtacaaaggcaaagccgggagatattatgaacatttcctttgatgtgaacaagattcatgtctttgacaaagaaacacagatgacaattacgaattaaattcaacagatggatgaatatttgaacaattttagaggggatacaggttgtattccctctttttatggtttatgattatagcagtttaaatcgagaacataaaaggaggaattgtggatggcatataatcagatgctgcaaagtacgattgaaggagttaagtccattgcaaggacggatctgtgcctgatggatacggagggcaatgtgattgcagcaacgaatgaggaggcacagcagtataaggaatctgtattgacatttgttgattcaccggcggagatacaggttgttcagggctatcagtattttaagatcctggatggtacaacggttgaatatgtgatgctgattcgtggtgacagtgatgatatttacacaatcggcaaactggttgcatttcagatacagaacttattgtctgcttataaagagaagtatgacaaagagaactttatcaagaatgtacttctggataatatgctcttggtggatatttataataaggccaagaaactccacattgatgctgaggaaagacggcttgtatttgtgattgagactaacagacagcgggataatcatgccatggaagtggtgaagagcctttttaccggcagacatggggattatattacagcggtggatgaagagaatattatccttgtgaagggactggatctgcaggagacatatgatgaaatgcagacccttgccaaaaccattgttgatctattgaatactgaggcaatgatcaatgcaagaatagcgtatggtaccattgtacataatatcaaggatatttccaggtcctataatgaggcgaagatggcactggatgtaggtaagattttttatgatgagaagtctgtcattgcatataacaagcttggcatcggacgtctgatttatcaactgccgattccgttgtgcaagatgtttattgatgagatttttcctggaacgacaccggatgaatttgatgaggaaacattgctgacaatccgcaaattctttgacaatagcctgaatgtatcagagacggcaaggcaattatatatccatagaaataccctggtttatcgtcttgacaaggttaataaagcaacaggattggatctgagagttttcgaagatgccattacttttgagattgcattgatggttgtgcgctatatgcactacatggagaataagatatactgattttgtatatgaaaaaaagtgatttaatgatgaaactttgcatttttacttaaaatttgtaaagtatgcttgaaattgtcgggctgacatagtaaaatgtgtatagtatacacaaggttagtatactatgcattttacgtgttaaaaatgtaacaatgaggtgcgtattttgaacagcaaatggataaaaagacttggcgtattactgttgctgctattgcttgtatttcagacggcggcctgtcagaagacggcgggacaaggcgatactgaagaggatgggacggcttcttcctatatattcaccatgggaaccgtttttgatatccgggtatttgccgaagatgcttctgatatcatgcaggaagcggaacaggcactttatggctgtgacagtcttctttcctggagagaggaagggtcattagcatacagatttaatacggagcatcaggcagatatgtctgagatgaaagaagtatttgaagatgcccttcaggtcagtaaagacagtcagggcgcatttgatctcactgttttaccgctttcacagctttggaattttgataagctcggggacagtgattttgatgtgtcaacaatgaaagtcccggataaagaagatattgcacaggcaatggcgaaagtggattatactcagctgaagtatgatgatgcgaccgggatacttactacagataatccggatattcagattgaattaggtgccattggcaaaggctatgctatcgagcaggcgaaggatgttttgaaacgttctgatgcatcaggcgggatggtttcggccggcagttccatttatgtctgtggaacaaagaaagatggcagccggttcagagtagctttaagagatccccgtggtgatgaaaattcagcaatcggggtgcttaccttgtcggatacgacgatatccacatccggcgattatgagcgctattttgaaaaggatggtgtgagatatcaccatatactggatccgcggacaggctatccggctgacagcggactgatgcaggtaacgattatctgtgatgacagtgtgattggagacgcactgtcaacggcatgttttgtccttggtctggacgagggcatgaatctggcagcaaaatatggtgttaatgcgatttttgttgatacagataagaatatctggtacaataacccggatgtcttgaattatttcgagtttacaggaaaggattcaggatatgttttaaatgaatataatcaggctcgcagttaaggctgtggactggtttatataataaagttttgcggacgaaagtccaaaaatatctagaggaggattcaaatggcaaaacaatcaagtggacttcttggcagtttaggatttgttaaaagccctggagcacccgtacctcacagaaaacataccagtgcttgtcagacagttgagatgccggtaccggcaactgtaactatcgttatgtcacagcatattggtgcaccttgtacaccatgcgttaaagcaaaggatcaggtgtttgtaggtacgcttgtaggtgaaagcactgcatttatgtcagcgccgatacattccagcgtgtcaggtacagtcaaaaaaattgacacagttttaatgccgaatggtacaaaggcacaggcaatcgtcatcgatacagatggtgaacagactgttgacccggctattcagccaccagtagtgaattcaaaagaggaatttattgaagctgttaaacagtcaggtcttgtaggtcttggtggtgccggtttcccagcacacatcaagttgaaccctaaggacaagattgaatatctctgcatcaatgcggcagaatgtgaaccttatatcacagccgatgtcagagagatcatggagaaccatgagaacgttctttacggtatcagccaggttatgaaatacgtcggtatcgacaaggctttgatcggtattgaggacaacaagcctgaagcaatcaagctgatgcaggagaagacagcacagatgagcaatgttgaagttgtgagcttaccttcccgttacccacagggtgctgagaaagttctcattgaacagtgtacaggacgtcaggtgcctcctggcaaactgccttctgatgtgggatgtatcgttatgaacgttgcatctgcaggtttcctcggcggttatctgaagaatggtattccgttgacaacaaagcgtgtcacggttgatggttctgcaattacagaagctaagaacgtcagagttccgatcggtgctccgattaaagatattattgcattctgcggcggatacaaaggtacaccggccaaactgatcagtggtggtcctatgatgggtactgcattgatgaccgatgatttccctgttctgaaacagaacaatgctttccttgctttcgatgaagcagaagctaaatctcttgaaccgacagcatgtatcagctgcggtcgttgcgttaatgcatgtcctatgaatctgatgcctacaaagcttgaggctgctactatctataagagagtagatgacctgaagaagtatagtgtcatgacatgtatggaatgcggttgctgtgcattcgtatgtccagcaaacaggaaactcgttcagtctatgagaattggtaaagccattcttcgtaatgcaggaaagtaggtgtacataatggatggtaaattaattgtttcttcatcccctcatatttcgagtccggtgaaaacaaagaatattatgcttgatgttatcatcgcattaatcccttctttgattgcatcaatttatttcttcggaccgagagctgctgttgttgttattgcttcagtagcaacttgtgtaatcgctgagtatatctgccgtaaagtcatgaagcgcgagcagacaatcggcgatctcagtgcagtcgtaacaggtattcttctggcattcaacctgccttcaagtgtaccgatctatgtgccgatcatcggtggtctggtagccatcgttatggttaaacagatgtttggtggccttggtcagaacttcgttaatccggctctgctggcacgtatcattctgatgaactccttccctgtactgatgacaacatggtatccatcaggcaactttggagctgatacaacagcaatggcttcaccgcttgctaacattgcagcaggtaatgtagatgcattgccatcttactgggatatgttcatcggtaacattcctggatgtttgggtgaaacaagtgcattagcacttctgattggtggtatttatctgattgccagaaaagttatctcaccgatcatccctgtaacttatattggtacagtatttgttctgtctgctattcttggacaggatcctgttgcccagattctctgcggtggtcttttcatcggtgcaatctttatggcaactgactatgtaacaagccctctgacgaataaaggcaaattcatctatgcactttgctgtggtattattacttgccttatccgtgtatttgcttcccttccggaaggtgtatcttactcaatcgttctgatgaacatcattgttcctctgattgagagagctacagttcctaaaccgtttggtactgtaaaggaggctaagtaatgaattttaaatcaattggtattcctacaatcaaattgttagttattgcagctgttattacaatacttctgttcctgacaaataatacaacagaagcaaagattgctcagaatcaggcagatgcgaatgtggcttcccgtaaggaagttcttccggatgctgacgattttgatgagaagacagtgactgttgacggtgtagagtatacatattatgaagccaagaatggcgcaggttatgtattctcaggttccaataaaggttacggcggtgctgtagtatccatggttggtatttcttccgatggtaaagttgtcggtgttaaagtgacagaagcttctgatgaaacacctggtcttggtgctaaatggatagctgctgatgcatcaggtaacgagagacgcgctcagtttgttggtgatatccctgaaagtggttctttcgctgttgttaaagatggcggtacaattgaggctgttgcaggtgcaacaatcacatcccgtgctgttacacatgatgttaatgatgcaatcgcacagtacaatgctgtagtaggaggtgctaactaatggctaaaaaagagaaaagttatggcgagattttgacagccggttttattaaagaaaaccctgttcttcgtcttgtattaggtacctgtcctacactggccgttacaacacaggcttttaacggtcttggtatgggtgccgcagctacactggtactgatcggttccaatgctgttatttcgttacttcgtaatgttattcctgataaggttcgtattccggctttcatcacaatcatcgctggtttcgtaacaattattcagatgcttgttaaggcgtttgtaccagctctggattcagcgcttggtatttatctgcctctgatcgttgttaactgtattattcttggccgtgcagaaagttttgccagcaagaataaagtccttccatccatccttgatggtcttggaatgggtatcggtttcacaattgcccttgtattaatgggttccatccgtgagatcattggtaatggttcatggtttggtatggttctcaatgatggtagtatgattcagcctatgctgattctcatcctgcctcctggtggtttctttgtattcggtatgttgattgcactgttcaatcgtcttgctgaaggtaaaggcaaagagcctgcaacattatcatgctgtaattgcccacaggctgccagctgtatgaaagcatcagaaggaggttgtgaataatgtcaattactggtttactttcaattttccttgcagccattctgacaaacaactatatcctgtctaaattccttggtatctgtccattcctgggcgtttccaagaaactggatacagcagtcagcatgagtgctgccgttatcgtcgtaatggttgttgctacagctgttacatggccaatccagacattactgttggatccacttggccttggttacttacagacaatcgtattcatcctgatcattgcagcacttgttcagttcattgagacgttcatgaagaagaacatgccgcctctttatcaggctctgggtgtataccttcctctgatcacaacaaactgtgcagtacttggtgttacaaccctgaatatcagctctggttataactatatcgaatcactgatcaattcatttggttcaggtgttggtttccttgttgccatggtactttttgcaggtgtcagaggaagactggaaacagcggatatccctaaatcattacagggtctgccaatcacactggtatccgcatctatcgtagcttgttcattccttggcttcggcggccttgtagacggcatttttaaataggagggattggacatgtatggtattattcttgtagcggttatcgcgattattgcaggtctgcttttgtcatgggcttccattcagttcgcagtacctgttgatgaaaaacaggcagcagtcagagaagtacttcctggtgctaactgtggtgcctgcggtttctccggttgtgacggctatgcagcagctcttgctgcaggaacagcagaaatcggtctttgttctcctggtggtccggatgttgcagaagaatgtgcaacaatcctgggcaaagcagcaggtgaaatggttagaaaagttgcgcttgtacagtgtaacggtacttgctcaaatgcaggtcagaaactcatctatgatggtgttgacacatgtcaggcagtgagcctgatgtttgccggtgacagcacatgtgcatatggctgccttggccatggtgactgtgcagctgtttgccctgagaaggcaatcattgttcatgacggtctggctatgatcgatcaggacaagtgtgttggctgtggtatctgtgtgaagacatgtccgaagcatgtgatcgcacttgtaccattcgagaagaaacatcatgtactttgcgtcaatacagataagggtgcagaagcaatgaaagtctgcaagacaagctgtattggttgtatgaagtgtgtgaagacttgtgagcatgacgcaatccatgttacaaacttcaatgcagccattgattatgataagtgtacaaactgcggcgcatgtgcagaagtgtgtccaaaacatgccatctgctaatagcgggctgtatacagattgttgattttaaggcggatgtcgaaaggcatccgccttttaaaatttaagagacgacgtcaaatgaatagtataaaatattgaaattccgggataatgaaaaaaacgaatccaactgtaagaaaactgaaagaaataactggcattattttcagaaatttgcagtagaatcattgatatagagtaaaatgaataactaaaaacaaaaggggaaaacgatggaacagcagacaatattaattgtagatgatgacagagaaattgtacgtgtcattgccaaaatacttgaactggaaggatataggacattgaaggcttatgatggactcgaggccctggatatgctggtgggcaatgttgtacacctgattatgatcgatatcatgatgccgaagatgaatggtcttgcagccgtgatgaaaatacgggagaccaataatattcctattatcattttatcagccaagaccgaggaaacagataaggttttgggactgtctatgggagcggatgactatatcagcaagccatttaatacccaggagatgattgccagagtgaaggcacagctgagacggtatatgcgtcttggagccatgaattcggaaagtatgcaggacagtattcgtattggtgatctgtatctggataaacatgccaaggaattaaatgttaatggtgaatccgttcatctgacggcaacagaatataaaattatggaactgctcatgagtaatccgggcagagtttttccggcggaagaaatttatgagcgtgtttggcaggaaccggcttattctgttgaaaatacagtcatggtacatattcggagaattcgtgaaaagattgagatcaatccgaaacaaccaaaatatttgaaggtggtgtggggaattggatacaaaattgaaaaagatgacagcaaatattaaaggtataaaaggatggttcgttctgacagtattagggcttgatgttctccttgggattgacggcggaaatctcataagtactttttacggggatgtcattatctatgttgcatttcttgcgacggttactgcaggcattatgctaacaatcagtttgaggccggacagtaaagagtggccgttttttgtaatttttgacaactttaagacagatacactgttttggctggaactattaattgttacatgcacaatggctgcctttgcatggattgccggtttatatgagtcctggagttgggcatattctgcaatctcgataatgggaaagcttttgtttttagtattggtgttgccggaagcctttgttgcggtaagctgttatgccatctttatccggcgcatgaaggatcgggagaaacgcagagggttgtggatccaatctgtttttccaaaacatgaaaaaaaacaaaaagtaaaaaaagaaaatcctatcagaaagctatatactaaattcagagaaagtgttgtttctttaaaagcagaatatgaacattctctgaattatgaaaaaaaacagctcatttgcacaattttgattgtaggcggcaatctttttatcatctgggctgtactttttgccaatagcggtatccttgtacttatcctgctgatcatcaatatcgtctattttataaggcagagaggtttttatcggaatgtaggtgaaattatcagggaactgcatcacctttctatgggagaagaagtgcgcccggtcaacatttctgagacatcgccgctttatgaggcaggatgcgatcttgagaaagtgaatgaaagtttggataagagtgtcaagcggcaggttaagagtgaacagatgaaaattgagctgatcacgaatgtatctcatgatcttaaaacaccattgacatcgattatcggatatattgacttgctgaaaaaggaagatatgtcaccggaggcacaggattatgtcaatgttatttcccagaagtcagagcatttaaaagaaatgatacaggatctttttgaaatatcaaaggctacaagcggcaatgcggagcttgttctggagaaactggatatggtgaagcttttgcagcagacactgggagatatggaagaccgtatcagcagtagcgggcgtatcattcgaacggtgctccctgaagaaccgctttatatcagcggtgacggcaagcggttatatcgtgtttatcagaatctgatggaaaatgcccttaaatattcaatggaaggaactcgcatttatgtggaaggacgtgtagaggaacagaaagttattacagaaataaaaaatattgctgcctacgagatggattttactgcagataagattgttgaacgattccagagaggagatgtcaacaggacaacggaaggacatggactgggcctggcaattgccaaaagtttttcagaggcctgtggcggacatcttgatatcattattgacggcgatatgtttaaagcggttatttcctatccattatattgggaaaattgacagctgtctgacttgttcttgtaaaagtgcatgctttttgatataattggtatcagatttgaaatgattataagattacacaggataatgctaaggcagggataatagaatggatacaggtgaacgcgcatatgagaaaatcattaactatgtagaacagcaggtcatgcagggtcgttacaagaagggcgataaattgccgcctgaaagagaactggcggcacttcttggtgcaagcaggaattctgtgcgggaagggcttggcattcttgaacgtatgggagcaatttccagtcagcagggggccgggaactttatttctgacaatttcgaaaagacactggttgaggtgatgacgctgatgttcatccttgaggagggaacattcagagaaatcagtgaatttcgatatgcattggagacacaggcactggcattggctatggaacatatctccaaaaagcaactggcggacattgagtattatatgtccatgcttgagaaaacaccggaagaagatatgaaggcttattatgacaagaagattcattatacaattacagctgcatcagggaatcggtttattattgacaatcttcaggcactgacagcagtcatggatgtcttcattagggatatgcgagccaagattctgagtgacggaagcaacagtgaaggtttgatggcggcccacagggaaatggtggaagcacttagggagaagaacatggagaaggggatgcaggcattgaaagttcattttgagtatatttatgaatatattgacggataaaatcgcttcgtcaccttagatgaaggaatctttcaaaaagcatagtgaaaccgacatgttcacagcaattgataagtaagaaatgtgtaaattatatggaataggaatataaaatcacaaaaaagaggacaaaattaataaaattcactagacaaatctggaataatattctataataatagacgtaagtggtagggccaatggtacaaaatcttgtgcccattttaaaaaagtaggaggaagtaaaaatgagtgagtatagcaaagtgactccggaaatcgttgagcagatcaaagctgttgttgctcctaacagagtgtatacaggcgcagatatcaacgaagacttttctcacgacgagatgtctatttatggtaaggcaatgcctgaattagtagttgatgcagtttctacagaagagatcgcagctacaatgaagattgcttatgataacaacattcctgtaacagccagaggtgcaggtacaggccttgtaggtgcctgtgttccaatcgccggtggtattgttattaatacaactaagatgaacaagattcttgaatatgacctgaacaacttcgtagttaaggttcagtgtggtgtccttctgaacgaccttgctgaagactgcgtaagcaaaggccttatgtacccaccagatccaggtgaaaagtttgctacattaggtggtaacgtttctactaatgccggtggtatgagagcatgtaaatacggcgctacaagagattatgttcgcgctatggaagttgttttaccaacaggtgaagttacacgttttggtagtacagtatccaagacatcttcaggttactctctgctgaaccttatgattggttccgaaggtacattaggtattatcacagaactgacattaaaggttatcccagcccctaaggaagttatcagcttggttattcctttcgaaacactggaagattgtattggcacagttcctcagtttaagaaaaacggtctggatcctcaggcacttgaattcatggagaaagctatcgttcaggcttctgaaagatatatcggcaagagcgtatatccacagaagattgatggcgtagaagctggcgcttatctgcttgttacatttgatggcaagacaaaggatgaacttgacaatattattgaagaagcttctgaaatcgctcttgaagctggcgcaatcgatgttcttgttgctgatacaccagcaaagatcaaagatgcatgggctgcaagaagctcattcctggaagctatcaaagctgagacaaactggaaagatggtctcgaaatgctcgacgaatgtgacgttgttgttcctctggacaagattgctccatacgttgaatatgtatatggcgtaggcgagaaattcggtcttagaatcgaatccttcggtcatgcaggcgatggtaaccttcatatctacatcattggtgatgataagatttctgttgcagatttcaaggctaaagcagatgaattctttgatgatatctatgctgaagctacaagagtaggcggtcttgtatccggtgaacatgcaattggttccggtaaacttgattaccttgctaaatctgttggaccaacacagatgaaactcatggaagacatcaagagagtctttgaccctaagatgattcttaaccctggtaaagtttgctacaaactgtaatttgaatatttggagttatcatttataaattccagcggggattcatgtgagagtgttaatactttcacatgaatatacctgttttaaagaacagttgtagtaaatcatacataaataaattacttttaaatcattaggagggatagtaatgaattttcactttaatgaagaagaacaggaaattctcgacatgttacacgactatgcagtcaaggaagtagctccaagagctcatgaaattgatgaggaagaaaaattccctatggaagcacgtaatggtcttgctgaaatgggtatgatgggtatgtatttcccagaagaatacggcggtgctggccttagctacctttcttacatcgcagtttgcgaggaactggctgttcattgtgctacaacatctgttgtattatccgctcatgaatctctttgcagctggcctatttacaaatacggtacagaagaacagaaaaagaaataccttacagctcttgcttcaggtgagaagttaggtgctttcggtttaacagagccaggcgctggtacagatgctgctatgcagaagacagttgctaaagatgaaggtgaccattgggtacttaacggttccaaggtattcatcacaaatgctcagtatgctgatatcttcgttgtatttgctatggtttacagaccagactacaaagaaaatccttacacaaatcatgatatctctgcatttatcattgaaaaaggcttcgaaggcttctcagttcagggccatgaaatgaagatgggtatccgtggttcatcaacatgctcactgtacttcgataactgtatcgttcctaaggaaaacctccttggacagcagggtaaaggcttcaaggttgctatgacaacacttgatggtggccgtatcggtatcgcagctcaggctgtcggtattgctcagggcgcaatcaatgaaactgttgcttatacaaaagaacgtgtacagtttggtaaaccaatctggaaattccagaatacacagttccagttagctgatatgcaggctaaagtagatgcagctcgtctgcttgtttaccgtgcagctcaggctaaacaggatggcgaaccacacagccacttagcagctatggctaagttagttgcttctgaaacagcttcagatgtagctcgtcgttgtgtacagctcgttggtggtaatggttactctcgtgaatatccattcgagcgtcatatgcgtgatgctaagatcacagaaatttatgaaggtacaagtgaagttcagcgtatggttatcgctggctggttaggtgctacaaaataattttcaggcctaatacctgtcaattaaaagataaattctgaggtttcctgtgattaagattcatttaggaaaaatataagagttttcacatggctggtgtgcaggcaactacacaccagttgtgctataaagaatgaggagtggataacaattatggaaatattagttttgattaaacaggttccagatgattccgttgaaattaagcttgatcctgcaacaggcgcaccaaaacttgatggtgttgaagctgttgttaatgcatttgatacatatgcactggaaatggctaaaagatatatcgaagacaatggcggtaatgttacagtcgctacaatcggtgacgacgatgcaacagctgctttaagaacatgtcttgctgttggtgccggcaaagctttcctgattaaggacgcttctttcgcaggttccgatacaacagctaaggcttatatcctttcaaaggcagtagctaagattgaagaaatcaatggcgctaaatttgatattgtattctgtggtaaagaagctacagatttctctaaaggtatggttggtgttcagctcgcttcagaactcggcgttggtgttgcaacagatgttattgctgttgaccctgctgaaggcggcgttactgttaaacaggaaacagaaactggctacaatgtaattgaaatgactacaccatgtgttgtaacaattcagaaaccagattatgatccaagatacccaacaattaagacaaagatggctgcaagaaaagctacaatcaatgaagtgactgctgcggatttagcagtagatgcagctaagattggcgaagcaggctctctgacaaaagtccttaaattatacgagccacctaagaaacaggctggtgttaagattcaggaagaaactgttgctgattctacaatgcgtgcgcttgctatgattgcagaagcaaaagtactttaatttaaggaggaattacaatggatttcgcagaatataaagacattcttgttgtattagagcttgacgaaggcaaaccggttaatgtcagccttgaaaatattgctgctgctaaatcagtagtaaatggcggcaaggttattgctgttacagtttgtgaaaatgctgcaaagacagcaattgaatatggcgcagacagcgcaatcgttattgaaggcgctcagtttgaaggttacaatgcagatgcagttgcagatgctgtagctcagatcgctgcagaagttaaacctgctgctatctttacaggtgctacaggcaaaggtaaagatttagttcctagaattgctgctaaactggctacaggttcagtttgtgacgcaacagctgttaaattagatgaagctggtaatgttgtatttacagtacctgcatacggtggcaatattctgacagatgttgttattgacagcgttagacctcaggttgcttctatccgtggcggttctgtagctaagcttgagccagaagctggaaaagctggtgatatcgctaagaaagcaatcacagttgctgatgatcagattaaacttcagatcaaagaaactgtaaaagaaatcgctgaatccgttaacctggaagaagcagaagttatcgttgcaggtggccgtggtatgggcagcaaagaaaacttcgacaaattacaggaactggcagatatccttggtggtgttgttggttgtacaagacctgctatggaatctggttggatcagccgtgcacatcaggttggtcagtcaggtaagatcgtagctccaaaggtatactttgcgtttggtatttccggtgctacacagcatgtatctggtatgatcggttccggttatattgttgctgtcaacaaagatgaagatgctccaatctttgatgttgcagatgtaggtatcgttggcggtgctatggatgttctcgacatcatgattgaagaattcaagaaaaacaaataatctgttgattgatttttcttgggctgatactttggtatcagccctttttttacgcggataatgagtcaaagcccatgcttgcatgtggccttgacaaatatcgcgataacgagcgaaactcgcaaagtgtgttttggctcgtttacgcaggttctcagctgatgggataggttatactttgtttataaatattatagatttctttcattgacctgggagctattttgcggtagtatagcaaataagcaatgttttatatctgtgataaggtgtgcaggagaatgataatgaaagaaggtatttcatgaaagaacgtatgcagcgattcatggccggccgctatggcaatgaccagctgaatcaatttatttttatagtggcaattatcagtatggtgcttgagatcattacgcggcagtcattgttttatacattgacattggtactgctgattctcgcttatgtcagagtattttcccggaatatcaataagcgatatgaagagaatatgaagtttttgcagaagaaagatgcaattttgaataagttccgcaagcagaaatattatgctgctcagcgcaggaattttcatatttatacgtgtcctcagtgcaagcagaagatccgcattcctaagggaaaagggaagatcagtattacatgtccgaagtgcagaacctcttttattaagaaaagctgatttttgcaagttgttgttgtatttttttcaaaaaaccagatgtttttgggtctgaaagatggtataataaacctgtcgtatgaatagaatcgacagcatttttttgaaatacaaagacacagttttttggaggggatttggaatatggttgaaaggaaggttaaggttgcaattccttgcggtatacatatcagaccggcaggaattatttcccatacagcgaatggttttaaggcagattcaagaattatattcgggtaccatgtgattaatacagccagtatcctgaatcttgttgccagcggtattcactgtggggatattgtcagcgttgagtgtgaaggaccggatgaacaggctgcactggatggcattacatcggttttggaagattcaacgattcaacaataagagatattatcgaataaaggagaaataatatgttagagaagattaaagcgcttttagcagaggaattaggtgtcaacgcagaggaaatcacagcagagacttcttttaaggaagatctcggtgctgattcactggatctttttgaactcgtaacaaatcttgaagaagaatacaatattgagattccggcagagcagttggaagagatgacaactgttggcaaagttattgattatctgaagagcattcatattgaggcataatctcttggaagccatcatttaagaagatgaaggaggcatattttctgtattgtatatagagaatatgtctcattttgtttttattcagataatatgaaaaaaactggaatattttatcataaactcttcacagtactattcgaaaatgatataatccaatatataaaagtcaataaatatatttatagatgcatctgaattgatgctttttttgcatatacattacgagaggaatcaagcaacaatgaatttgaaacatttatcatattttgtcgatatttcgaagcgggagagctttacaaaggctgcggatgatatctatgtttcacaatcagcattgagcaaatcagtgaaatcccttgaacaggaactgaatgttacgctgattgaccgcacaagcaagagctttaatctgacagaagaggggaagattcttttttctgagggagagaagttacttcagtatatcgatgagagccagaatgagatcattgagaaaatatgcaagagcagacgccgtctgagaatcggtgtgcctccagtggcatcgaccgtttatttcagccatctgctgtatcgttttatgaagaagtatccggatattgatctgaagatgtcagaggtcggagccaatattgtacagactcaggtaaattcaggaagtattgatatcggtatcgttgtgctgccgatgcttaatacagagaattacaatgtcataccggcgatgacggcggacaatgctttgatcgtgaataaggatcatccactggcatccagagaagaagtcagcttcaaggagttggagcatgaagatttcttgatactggacgggacatatatgctgcatgacagtattatccgcaactgtgagattgccggtttttatccgcatattacaacggagagttcccagtgggatttcctggcggagatggtagcctacaatcagggaatcagtattctgccggttccgattatgaaacgtttctcttccagtgagaagattaagatgatccgcctgaaagagccggaattgccatggaacataggcatgatattcaagaaagacaaattgatcacggaacagatgaaggtatttattcagtttgtcttagacaataaggataatgtcaaagattatacataagaaggagtgttgtggtgatgcacagcacttttttgtttgaaggccgccagaggacggttcacgtgacacagaccggtcatatgccggctgtacttgtcttatccggcggcaaagaatgtatttgttcttcgattacagtttatgcactttatgggatgttttatgcatacaaataacttgattatcctgaaaataaatggtaaagttgtacatgacatcataagatcaaaatggcgcggagtttttgacgcctttaagtaaaagaatatataggagtagataaaatgggacaggcagtggttgtattaaaaaaaggtgaaggccgcacgttgaaggctggcggtatgtgggtctatgacaatgagatcgcatcggtaacaggcagttatgaagatggtgacatggtcatcgtcagggattttgatggtttcccaatgggacgtggatttatcaatcgtcattctaagatcagggttcgtttgatgacgcgtcatatagagcaggaaattgaccgtgaatttttaaaggaaagacttcaggctgcatgggattatcgtaagaaagtaacagatgtatccagctgcaggcttgtgtttggagaggcagattttctgccgggcctggtagttgataaattttcagatgtacttgtggtacaggtgacagccctgggtatggatcgaatgaagcttgagattgtcgatctgttgaaagagattctggtggcagatggcattgagataaagggtgtgtatgagagaagcgacggtaagtatcgtgatcaggagggtatggagcgcattaaagattttattggtgagccttttgacacagatgttccgattatggagaatggtgtgcgatatattgttgatgtgaaggatggtcagaagacaggctttttcctggatcagaaatacaatcgattggcaattcagaaattatgcagaggggcgagagtactggactgctttacacatacaggctccttcgcattaaatgcagggattgcaggtgcagcggaggttacaggtgtggatgcatcggagttggcggtgcatcaggcagaagagaatgctgctttgaatcagctgcaggataccgtgcattttcagtgtgtagatgtttttaacctgctgccggagttggagaagcagggagagaaatacgatgttgttattttggatccgccggcctttacgaaatcaagaaattctgttaagcatgcgatgaaaggatacagagagattaacatgcgtggtatgaagctggtcaaagacggcggatttcttgccacatgttcatgttcgcattttatgacgtatgagctgtttacagagatgctgcatcaggcggcaagaagtgtacataagcgtctacgtcagattgaatatcgcacacaggcagcagatcacccaattttatggtctgcagatgagtcttattatttgaaattttacattttccaggtagtggatgagaaatagaggccggacatgaattatgaggaagcaataagttatatagaaaaagtgagctgcaacggaattatgccagggctggtgagaatccaggcactgctggaaaaaacgggacatcctgaaatggactgcaatgtgattcatgtggccgggacgaatggaaaggggtctgtatgcacctatattgcttctatactaatgcaggccggatataaggtcggacgctatgtttcaccgacactttttgattatagagagcgtattcaggtcaacggaaaatggatatccaggaaggatacggcctactggatgagccgggtgcgggaagtcgatgaacggatgcagtcagaggggatagaaggcgcttctgcctttgaactggaaacggtaatggcctttttgtacttcaaagccatggcatgtgactttgttgtacttgagacaggaatgggcggaaggctggatgcgaccaatgtagtgcccaagccggtattatcagttgttacatctattggcatggatcatatgcattttcttgggaatacgattgaagcaatcgcagttgagaagggcggcattattaaagagaaaagaccggtggtgattggggccggcaggcagaaggctgttgacaccctgatacggatcagcttggaaagacaaagtgaatatgcggtagtcggggctgaagatgtccacatgacgtatgcggatctcttcggaggccagcagttcgactttgaatcttataaagagcttcagacccggatggtcggcaggtgtcagccgtggaatgcagcgattgctgtaaaggcggttgagatgctgggcaagatgacagcaacggattgtccggtacagttggatgtccttccaaaagacgtgttgagtgagcaggtggtcaggaaaggcatcgcatctgcttactggcagggacggtttgaggtaatggagaaaaatccgtcactgataattgatggggcccataatccggatggtgtacagagtcttgtggattctatgaaagcatatttgtcagataagcctgttattcttgttatgggtgtttttgcagacaaagattacagacagatgcttgagatggtttcagattgttctgatacattgattgcttttaaaccggataatccacgaggacttgctgccgaacagcttaaagagacagcggagccgtttttcaagcgaaccttagcagcgaagagccaggcggaggcccttgcaattgccaggaagatcggagaaggtaatcatgcgattgtatgttttggttcgttatcgacaatggcggggtggtaccaattaacaggaaggaaattttcagatgaagaatatagacagaattattaatcatccgctgtttatcatgtccatgaagaagattcatgactatgaaattgaccgggtattttgctgccatggaattgaacacagtcttgatgtggccagagtggcatatattacaaatctggagcagaatcttggttttcagaaggaaatgatctatgctgctgcgctgctgcatgatatcggaagatggcgacagtatgagaagaatatacctcatgaggaggccggtgcggcccttgcagcagatatcctggaagacaccgctttcagtaaggaagcaatagggcagatcttggcggctatcggcagtcatagagagaaaatggaaatggaaacagacagatttgcatatttactttatgagtctgataaaaaatccagaatatgttggctttgtgaggcacaggatacgtgttactggccggagacacagaaaaacaggacagtcagcaactgacaggaggcagaaaatgcagataggcaataaaatatttgatacagagcatcatacggctgtgatggccattttaaatgtaacaccggattctttttcggatggcggcagctacaaaaatatggatgatatcagacgtcgtgtcagccagatgatcgaggaaggcgctgaaattatcgatattggcggagaatccacaagaccgggacatattcagatttctgacgaagaagagatctgcagagttgcaccggttgtggcatgtctcaagaaagaatttgatattccgctttcggtggatacttacaaatcggcagtggcagaagcagctattcaggccggatgtgatctgatcaatgatatatgggggcttcaatatgatgaaaagatggcggggcttatcgcggatgcaggcgtttcctgctgtctgatgcataacagggaaaaggtcgactacagagatttcctgccggattgcatggcagatatgagaaagattatcgagacagccaaagtggcagggatagcagaggacaaaatgattctggatcctggtgttggatttggcaaaacgctggaacagaatctgatggttatgaaacatttgaatgattttaatcagtttggctatccggtacttcttggtacttcaaggaagtctatgattggcctgacccttgatttgccggtggatcagagagtggagggaacaattacaacttccgtgtgggctgtgcaggcacactatggctttgtgcgtgtgcatgatgtagcggctaattatcgtgctgtacggatggccgaagcaattatgaatgcacaatagagatacggaataagcagatgtttttcaaaggttgaaaggggccctgcattttggataagatatgtatacgtagattggaagtatatgcccatcatggcgtttatgaagaagagaaacgactgggacagaagttctatattacagtagagatggaactggatacaagagcagcaggtatcagcgatgatcttcaggcatccgtcaattacggggaagtttgcctgggaattgtggaatggacgaagagccacagaagaaagctgattgaagcggcagcagaggatattgcacattacctgcttgttcagtatccgatggtcagaaaggtgacggttgaacttgagaagccgggagcaccggttccctatgcatttgatacggttctggtacatattgagagaagcagacatcaggctttccttggtatcggcagcaatctgggggatcgtcagatgaaccttgcggcagcaatccggcttctggaggcagtgccggacctacaggtgacaaagcgttcgccactttatgagacagcaccttacggatatacggatcagccgccgtttctgaatggctgtattggcatagagacgctgtatacaccggaagagttattgagggtgctgcatgaaatagagcataagctgggcagaaaacgtgaaattcactggggaccaagaacccttgatctggacatacttttttatgatgatctgatactggataccccggatctgcatattccacatgcagatatggctaacagagaatttgttctgcagccgttatcggatattgccggagatttcagacatccggttataaatgagacagtgaatgcactgcttgcggcattaaaaaagcaaagcaattaattacggttgaatgagacaggggatgaacagatggatttaggcgtactaagagatcagatcgatgatattgacaaacagatcatccgtctttttgaagaaagaatggatgtagcagaacaggtggcacgttataagattggctgtggaaagccggtgtatgatccggtgagggaacgcagcaagattgaaagagccaaagatatggcaacaagcagtttcaacgcccggggtgtggaaacattatttaatcagttgatggccatcagccgtgtgcgtcagtatgagctggtggctgaggcccatcaggacaatttcggctttgaggaatgcaacggtgaccatgcaggggcaaaggttgccttccagggggtagagggcgcttacggtcatcaggcgacacttgggtattttggcaaagatgtggactgctatcatgtgaagacatttgaggatgttatgaaggaagtgcatgaggggcgtgctgattatggtgtgctgcctgtggaaaattcgtcaacgggtattattacagatgtctatgatctgatgcatctgtatgataactatattgtaggtgagtatgttgtgaaggttgaacatgcattgctgggccttccgggaacggaaattgaccagatcaagacggtttattctcacccgcaggggctgcttcagtgtagcagttttcttgatgaaaaaccggaatgggaacaggtaagtctgcagaatacagcagtcagtgcaaaaaaagtcctcgttgagcaggacagaacccaggcggccatcgcatcaccggcagcggcagctatttattcattatctgtattaaaagaaaagatcagtgataatgacaataattccacacgttttatcattattcgtcacaagaaagaatatgtcaaaggtgcggacggtatcagtatttcttttgaactggcgaatgcccatgagaccggaagtctgtatcatgcccttggatttattatttataatagtctgaatatgacaaaaattgaatcaagaccaatccagggggacaaatggcgttatcgtttctttattgattttgacggcaatattggtgaggcccctgttcaggatgcattaagaggaatggcacaggagaccattaatttcaagatactcggcaattatattcaggttgaataagggggattggcatgacgtacaaaacctttgccgctattaatgtggggtccggagaagttagtatgaagatctatgagatctcccccaaaacaggaattcgggaaattgactatgttcgttattatatcgaacttggaagtgatacttatacaaaaggttatattgaatacgatcttgtcagggaattgtgtgatgtcctggagggcttttccactaaaatggaagagtacagggttgacagttatctggccctcggcagcagtgcactgattgaggccagcaattgtgaattgatcgtggatcagatccgtgtgcgtacaggtttgaaagtagagactattgacaatgcgcagcagcgttttctgctgttgaaatctgtggcccgcgggatgagaaattttgaacagctgattgatgatggtgcagcgattgtcgatatgggctcgggaagtctgcagattacgatttatgatgagggcagactgatctatacgcagaacctgaagcttggatcgcttcgaatcagagagattctggcagacctggagggacagacggataattttgtcaacgtcatggaagattatatcggcaattatatcgatacattttcaagactgtttatgcatgagcgcaaagtgcgccatattattgcagttggagaagagatggaatccattgtcaagatcatcggcagtgacggcaggaaaaactatatggaacggcatgcttttgatgcggtatgcggaagtgtgctggcagcaggtgaagaagagttgtcagcaaagtacagtattccttatgagcttgcaaccgtcctgaaaccggcaatcattgtttacaaaaagattattgagatctcaggtgcagagaagatatgggcggcaggctgtgatctgtgtgacggtatgatcgtggattatgcggaaaggcaggaacagattgaaccggcgcattattttgctgaagatattatttcttatgcaaggacagtggcagcccgatatgagagcaacaaagagcatacggagaatgtcgaaaaaacagccctggcaatatttgacggcatcaaaaagagagcaggactggatcagcgcgacggcattcttctgcagatggcctgtattcttcatgactgcggcaagtatgtcaatatgcttggtggtacagattacagctgcgctattgttcgtgcgacagaatttgtcggattgtcggaacaggagaagagtattattgctgatacgatcaaatacaatgcatggcattatgtgccgaagctgtctgaattgaaagcaccgctcaacagaaaaaattatattcgcatgctgaagctggctgccattctgagactggcaaatggtatggacagaagtcaccgacagaagatccgaaaagtcacaacaactttcaaagaaaaggaactgatcatccgtgcagatacgatttatgatattacccttgaacaaagtacaatagagaataagagtcatttcttcgaagaaatttatggatttaagcctgtgttgagaatgaagaggaggtaaggtcatgagcaatcaatttgaacagccggagaattataggaatcgtgaactcagctggttggagtttgattacagagtgctgagtgaagccagagacaaaagcctgccgctttttgaaagattgaagtttttaagtattacagcttccaatctggatgagttttttatgatccgtgtggcttcattgaaggacatggttcacgcggggtatacaaaaccggacatagccggcatgaagccccaggagcagctgaagcacatcagcaaaaagacacatgagctggtgggggttcagtacagcacatataaccgttcttttttgccggcactcagacagaaccatatggtgattattgaccagtttgaggatctgagtccgaaacaggcagaatttgttgacgaatattttatgcgtgatgtgtatccggtgcttactccgatggctgttgattcgtcgagaccttttccgctgatccgcaataaaacattgaatatcggtgcactgatcagggatgaacagcagaaaggggaatatgattttgctacggtccaggtgccgaatgttctgccaaggattgttatgatcccatctgaaaatgatgaagatacaacggttattcttcttgaacagatcatagagaaaaatatccagaaattgtttctaaattatgaagtgatctgtgcgcatccatacagaattatgcgtaatgcggatttgtctattgatgaagaagacgcggcggatcttctgaaagaaattcagaggcagctgaagatgcgtcaatggggcgaagttatccgtctggaagcagaagaaaatatggacaggcggttattaaaaatcctcaaaaaggaattagatgtggcagaagaagcgatttatcgtatcggagggccgctggatctgacatttctgatgaaagtcagcggttttgaagggtttgatcaccttagatacagtaaatatacaccacagcctgtgaaagggatgaatacggaagaggacatatttacccagatccgcaggaaggatattcttctgcaccatccgtatcagacatttacgccggttattgagttcgtccgccaggcagctaaggatccggatgttctggctatcaaacagacgctttaccgcgtcagcggcaattcaccgatcattgcatcgctggcagcagcagcggagaacggtaagcaggtaacggtccttgtggagctgaaagcccgttttgatgaggagaataatatcctgtgggcaaagatgctggagaaggccggatgccatgttatttacggcctgaggggcctgaagactcatagtaagatcaccctggtcgtccggagagatgaggatggtatcagacgatatgtgcatctcggcaccggcaattataatgaccagacagcgaagctgtatacagacatgggattgcttacttgttctaaaccaatcggagaggatgcgacagcggtctttaatatgctgtccggctattcagagcctccgtattggaataaactggtcgttgcacctatctggctgagagatcggttcctgaagctgatagacagggaaactgaacatgcaaggcagggcaaaccagcaaggattattgcgaaaatgaattcattgtgtgataagaagattattgcggctctttatgaggcctcctgcgcaggcgttgaaatccagctgatcatcagggggatctgctgcctgaaggccggaattccgggactcagtgaaaatatccatgtgcgttccattgtggggaattttctggagcacagcagaatcttctattgttataatgatggctgggaagatatttacatgggaagtgccgactggatgcctagaaaccttgataagcgggtagaaatcatgttcccggtggaagacgaggagtgcaaaaaggctgtgaagcatattctcagcgtccagctggcagacaatgtcaaggcacatattctccagctggacggcagctacagcaaaattgacaagcgcggcaaagtacttgttaattctcaggagtatttctgcaaggaggctgttggggaagcaaagggcatggaagaggaaagtgttcaaattcgaagagtatttgaaccgttgctgcatgtagatgaatagattgcagtgataaaaatcggcaggcataaaacagctggatgacggacataaaaaagaggccggtaaatggagtggataacatttgccggccctttatagcgtagttttattcttcgatggagagcattcggtcaatcattatgccgtatttctcatagaatctgaagacatcttctgagccgtaaacattgcagagcgaagaagactgaagttcagagaaatactgactgatgccgccgatcaaagtttcgttctgcatggtgtagaaacttggtcccagatgtgtacgtgcgtcatagtgttccatattcttcaggaaaagcttgcgcttgttgttataaacagacatctggaaaagatgttctgagttggggatgcattcatcatcaataatgaaaaagcgtatattcggatttttctgtaccagatcaagcacatgctggatatgcttctttcgttcctcaacagacatgtgataaacgacatctgcaaaataaatcgtcccatcggtaatatagcgtatgaggttggttttcaggaggtagaaatcaattgctcctttttcaaaaatctcttcccatgtgatgccgagatgtgcaacgagctgagccatgctttcatcaaaaccctgatcgcgggcagcctggatcaatcttggattgatctccggcggaagaagaaattcaaaaccctttgtcaccataatctgaaaagtgttgtgtgcataaaattctgtccggtagccgttataaaaaagttcttcggaatcggaggaatggatcatcagccggctcaaagtgaattctgaattcactttctggtaaagactattgacctgcgcagtatctgtaatgatatgtgcgatgctgatacggtagtccttgtcaagagcgcactgcacagcaatgcagttcttgacgataaacagattcatatagtccatgcatgtgttctcatagaaatcaaaactgatatcgttataatgattcaggaaatagtacaactgaggaatatagctgttgttcttgcaatggcctccgagattgattcccatcttgatatgaacgggattggtataataggcctgacggccggtctcataggaaagatctttaaggaatccgcatatatccattgtacagagtatctgacatggttcgttcagctgatgcagcagctgaggcagttcagtcacaaaaaagttcttaatatcaagttgccagagaagcatgcgttgggatgagagtccggcaagctgtgcgttttcagatgtattatcgtaggaacgtttatacgcatccttcagaagctgaaagatggtcgatgagagcgatgattcatcatatggtccggaagcattgaattccgcagcgaaaagagtagcctcttcctggataataatttcccgtgcaaaaacgtctgcaagacatttgttgacattaggggcggctttggcagcaggcagtttgcctttgttgcaccatttgctgatataagatgtgtcataacctacgatctcggcaagatttgttaacttaatattagtaaagcgaatcagcttttttaacaaagtgccataggcgttcattgtgcatacctccctcttaagtattctgatatctagtataacacttaaaaattgaattttcaatcaaaattgaataatgttgattcatctttgactggaatgaagaaaaaagatgaaagcaatgtctgcttgatttcattcctatatgtcgaaaaattggttaaaatataggcatctgataaaaataattgtcagagtttgatgtgcggtatatttgaacggaaaaccgtacagttgatgattctgattctaccagatacggatcatcacatggactgaatatttttgaaataacatatgagaagtctcctccttaaccctaccacaacattagaagaagatttgaatagtaagtttctgatttattcacaaaaaatcttccatattattgctttatgggcgcaataatatggaagtttttttgttgtacagtaattatcgcctgtacgcaaataaattttttataaattatcaaaaaaaaatatgaaatatcataaagaaaatagacgttgtgttgacttttagaaatcattcgctataattaaacaataaatctaatttgcatcaggaatgactgaaaggaggacacgtctgtggacaatatgaatcacttattatttgattttttagataagcatgcggatatgtatgagggaaaagatgcgatcaatccggaattgtatgatttatataaggtaaagcgtggtttgagagacaagaatggcaatggtgttgtagcggggctgacaacgatttcgaccattgaggcttttgatatcagtggagatcagaaagttccctgcgatgggcgcttgtactacagaggatacgatgtgagggaactggtttcgggaacggtaagagagaaacgtttcggctttgaggaagctgcgtatctgctgatgtttggctgtcttccggacaggagagaactgaaacagttttgtgatgtgctggggagtatgagaacacttccaacgaattttgtgcgtgatgttattatgaaggcaccaagccgtgatatcatgaattctctgatgaagagtattctgaccctggcatcttatgacagtcgtgtcaacgacctgagtgaagtgaatgtactcagacagtgtatgatgcttatcagtgaagtaccgatgatggctgtttacggttatcatgcctataatcattacgaatgcgaagagagtatgtatattcatcggccgtctccggagctgtcaactgctgagaatattctcatgatgctcaggccggataagaagtatacagaactggaggcacgtgtactggatgtggctttgatgctgcacatggaacatggtggcggtaataattccacattcacaacgcatgttgttacttcatccgggtctgatacatactcggttatggcggcagccctggcttccctgaagggaccgaaacacggtggcgccaacatcaaggttatggagatgatggatgacttgagagccaatgtcagcgacacgaaggatgaggagaagatcagaaattatcttgaccaactggtagacaaacaggcttttgacaagaaaggactgatctacggcatgggtcatgccgtttattcactgtctgatccgagagccgttgtgttcaaaagttttgttgaaagccttgcgaaggaaaagggcagaatggatgattaccatctgtataccacaatagaacgtctggctccggaggttattgctgagaagagaaaaatttataaaggcgtcagtgccaatgtggatttttacagtggatttgtgtacagcatgcttggtattccggtggaattatacacaccaatttttgcaatggcaagagttgtgggctggagcgcccatcgtatggaagagctggtgaatgcggataagattattcgtccggcttacaagagtgttgcagaaaaacgtatttatcagccaatcgataaaagacaggagcgagagctggccgggggaaattatcgtaaaatcgaagaaaaataatacaaaacaggattgtacttgatttagtacaatttcaaaaaatgcataacagaatcacaaaaatataataacaaaaatactttttaataagtagaaacacgatacatttatgttaaaaaaatatcatacccattttcaatgagtatgatatttttttagtttgcatgcaaaatttctattatatatctttgccatatcttaaaaatataccaaaaatgttaaataaataacaaataaataaatcaaaaataaattataaccaaatgttttgtgggatttaatacttatggacaataaaaaatagaatatgttataattattgcataaaaagtatgagaagaggttgcgtatgtttgtgttattctttttgttctgggtgatgctcaacgggcggataacagttgagattactctgttcgggttggtcatttcagcggctatgtatgtattcgtatgcaaattcacagaattcagtttcagaaaggatatgtggattgtaaggaaactgccgtggatcattggatattgtttcattttgattaatgagattattaaagccaacctgacaatgattcactatctgctttcaccgcagattcttccggagccggccctggtgcgttttcatacggatttaaagacccgtacagcacaggtccttctggcaaattcgattaccctgacacccggcacgatcactgtagagatgaaggatggcgaatacctgattcattgttatgacaagacaatgggagagggtcttgattcatctgtttttgtctctatgttaaagaaactggaggaatgaaatggacgctgcatttaaatcattttttcttgtatgtattattgtcctggcagtcctgacatttttctgtctggtcagaaccatcaaaggaccacgtcttgttgaccgcattgtcggaacgaatatgatcggaacgatgacaattgccgttattgcacttcttgcagcttatctgaatgagagcagtattctggatatttgtctgatctatgcaattatgagttttgtggctgtcattgtactgacaaagatttatattggtatttataatgagaaaaagagtagacagagcagaatagaggaggagagtcaggatgaatattagtctgattcgttttatcatcgcggctgtgttgattatgatcgggatattgatcatggtgatacagacttttggtgtatttaaactgagctatgcattgaatcgtatgcatgctgcagcaatgggagattcactgggaatcatgatgatcgttctgggcatgatggtgatatacggtatttcctttgcttctttgaagcttttgaccgtacttgttgttttctggtttgcatcaccggtatgcagccatttactggccaagcttgaagtcagcacgaatgaacagattgaggatgaatgtgaggtgccgaaagaatgactggtttgagaatattattgcttgtgctgctgatcatctgtactatcgcagtgagcttttcaaaaaatctgctggtttctgttgttatttatatggcatttagtttggttatgtcgattatatggcttattctggagtctcctgacctggcgattacagaagctgctgtaggtgccggcgttacaagtatccttttctttgtaactcttaagaagatacgttctatacgaacgacggcagaggaggacattgatgagtaagaagaatccgaattatcgtaatagtttcgccgataagtttacccgttgggtaaagggtgattatgatccaattgtgggtcagatggagatgaatgcaccggataaggaagtctttggtgatgagagaatccgttacgtgcatttacatattgtcaaatccaacaactacagtgagcgtatgtttgaggaagggcttgccaagaatgtcagaaggtttacaggcctttataaggtttttggtgcaattgtggcaatctttattgcctgtctgcttctttggacggtcagttacctgccgaagtttggtgatccgaacgctccggagaataacgaagtcgcaacccgttatatagagcagggattaagtgaaaccggcgctgtcaacattgtaaccggtatgattcttgattacagagcgttcgatacattcggtgagtcctgtgtattgtttgttgcttcatgttgtgtattgattcttttaagagtggacaaggatgaggatcctgagtcaagagctattgaagatatgaatgacagacattacgagccgagaaatgatacgattctgcagaaagtagctaatttcctggtaccactgatgattatttttggtatctatgtggtacttaacggtcatatttcaccgggtggcggtttctcaggcggtgcgatcatcggttcaggattaattctgtatctgacagcctatggatttgagaaaacacagcgttttatgaatgagaaggttgttaaggcgctgaccgtgggcgcactgacattttattgttttgcaaaaagttattcattttatacaggtgcgaatcacctgcacagcattattacaccgggaacgccgggcaatattctcagtgctggcctgattgtataccttaacatctgcgtcggcattgttgttgcatgcacgatgtattcattttatacactgttcagaaagggaggaatttgatatgggctcatttgcgaccaattatgaagaaatcgcagcggttcttctttttgttattggcatgagtaatcttgttttccaaccgaatctgctcaagaaaattatcggactcgatatcatggattctgctgtttaccttttccttgcagccaaaggctatattgaaggacgaacagcgccaatcgttgttgatggtattctggatgccagtcattatatcaaccctgttccggcaggtctggtacttacaggaattgttgtatctgtcagtgtcagtgcgttgatgatggcgttgactgtctgtctttacagagaataccatacccttaacatcgatgagattatgatgaagctcagaaaggaggaagactaaatggcctttgtccagaattttccgtttttctgcattattttgtcgatgttttcagctatcatttcatttgtaatgaatggcagggtcgcaaagtatattcatgtggcgatggtcactgcagtattgatcctttcactggcaacgctttcctttgtggttggaaccggtgaaagctacacctttatgatgggtcattttccagcaccatggggcaatgagatccgtattggtgaactggaagcactgatggcagtatttttcagcctgattatgatgctgtccgttttcggcggcatggcccatattgacagagaagtacaggattccaagaagaaccttttctacattcttctggatcttttgatggcttcacttcttgcgttgatctatactaatgaccttttcacggcatatgtttttatcgaaattaatacaattgctgcctgcggtctgattatgatcaagaagcagggaagaacctatgtgtctgccctcagatatatgattatgagtcttgtgggttcgggccttttcctgatcggtctgacacttctttacagtattaccggacatctgcttatgtccccggctaaggaagtactggaacagatcgttgccgtacacaactatcaagtgccgctgatggttattattattcttgtaacggttggtcttggtattaagagtggtctttatccgtttcatacatggattccggatgcctatggctatacaacaccgtctgccagtgcggttttatcttcactggtatctaaaggatatattttccttctgatcaagattttctacagagtacttgattttgattcggtcatcagcagccatatggtcaacattctgtttgcttttggtgtggtcggaatgattatgggttctgtggcagcaatcaaggagaaaaatatccgaagaatgacggcgtattcctcagtagctcagattggctatatttatatgggtattggtcttggaacgacagccggtgttgtggctgcactgtttcatatcatttcccatggcgccatgaagtctctgctgtttatcagtatttcaggattgacggaagtgtcggatggacgctcagattatctttcattgagaggcgcgggactgcgcaataaggttgcaggtgcagcttttacagtgggttcactttctatgatcggtatgccgctgctgacaggtttcgtatccaaatatttatttgccgctgctgcaacaactgccggtagtaaaatgatcacagcatgggttgtgctggcaatcagtaccgtgctgaacaccatgtattttatgcgtacggtattgacgctttacagacctgtaccggaggaaacacataaagcatatacggttgagaagtccaggattgagacagcagcgattattggaatgattcttttgaatatcgggctgggtgttgcatcacagcctgtgattaaggtaatagaagccggccttgcaatgtttggctgataaggaggaaaaaatggatattaataattattttttactttttccggtgcttctgccgatcattgcaggcgtactgctgatgtttatcaagttcgggaaacgggagcatatgcagttgtatatacttctgatacttgttattgacctggcaagcattggatggatcgcactgcagccagaagatacattgaccttaagtcagttcttcattgcggaaggactgcatgtatttttccatgtggatatgctttcaaagattttttcagtgcttatcgcatttgtatggctgatggtaggcattgcgtcttttgagtatatggcgcatgagaagaatgaacagcgtttttattgtttttacctggttgtaggcggtgtcctgtcggcgcttgctttttcgggcaatctgctgacaatgtatgttttttatgaaatgatgactttgacatctatgccgcttgttatgcacaacctgagccatgaagcaattatggcagggttgaaatatctcttttattcagtagcaggtgcttttatggtgctttttggatttttcctgttcaatgcagagggaagagtactgtattttgcaccgggcggtattattaatgaaccgaatccgtctggtatcatgctgtttgctgtttttctgatgattattggattcggcacaaaagcaggtatgttaccgatgcatggatggctgccgacagcccatccggtggctccggctccggccagtgccgtattatccggtgtcattacgaaagcaggtgttcttggtatcatccgatcggtttattatgtggcagggccggatatgattaaaggtacatgggtgcagtatacctggattattttgtctatcctgactatctttatggggtccatgatggcttataaggagaaggtgctgaagaaacgtctggcttactcaacagtcagtcaggtatcttatattctgtttggcttgtcggtgatgcagccgatcgcttttgtgggtgcgttgatgcatgtgattttccattcgctggtcaaaaatacgctttttgtatccgcaggtgcgattatctgtaagacaggaaagacaaaggtgcgtcagcttgtaggaatcggcaaggagatgccggtgaccatgtggtgctttacacttgtgtctctgacattgatcggtattccgccgacaagtgcatttgtcagtaagtggtatctgatttccggtgcattggattcgggtattccgggattttcatgggttggtccggttgtcctgctgatcagtgcattattgacagccggttatctgctgacgatttctatcaaagcatttttcccgggagaagattatgattatacgaaacttgtaaaccatgaaccgacatggcggatgctgctgccgatggttgtgatgacagcgttggcagttattcttggcatctggccggcgggtctgatgaaaatatttgcagatattgctgcatcagtactttaagggaggagaagaagtatgccatcttattttatactagtaccgattctgctgcctgtgatcgtgggtattctgctgctgatctttccaattgaggatgcaaagaaacgaaatatttgtattgaaattgtggttgttctcaataccatccttgttctgtggcttctgacacaccgtccgacagaaagcttttatatgttctcgctgggggcacgtctgccgctgacattgaatattgatggtttgtccatgtttttcggcggtctggtggcctgtctgtggcccttggcttcattatatgcctttgaatatatgaagcatgaggaacgtgtcaatacatttatggctttttatacgattacatatggtgtgacacttggcgttgcttttgcaggcaatatcattaccatgtatctcttttatgaatgcctgacaatggtgacattgccgttggtgatccacacgatgacccgagaggccagaaaggcaacaagacaatatctgtattacatgattggcggtacggcttttgcttttatagccattgtgttttattcattattctgcaatgatattgcttttgttcttggcggcaatctgaatcttgcggctatcagcaatcatatggatattgcgctgttggtctatgtctttggctttttcggatttggtgtcaaagcagcgatttttccgttccatggatggctgcctgcagcctctgtggcaccaacacctgtaacagcgctgctgcatgcagttgcggttgttaagtccggtgcctttgccattatgcgtctgacttattattgctttggtacagaggcacttcatggcacctgggcccaggttgttgttttgatcgcagcgctgatcacgatcacttatggttctacactgggtgtcagagaaacacatttcaaacgaagattggcttattcgacaatcagtaacctttcctatattcttctggcagtagcgactatgtcaccattaggcctgatcgccggtctcagtcatatggctgttcatgccattatgaagatcagtgctttcttctgtgccggtgcagttatgcatcagactgagaagaattatatctatgagctggatggtctgggctttgagatgccggtgacgtttatagcgttgtttatctctggtctgtcgctgatgggcatgccgctttttgcggggtttgtaagtaaatggaacatcgttcatgcattgcttgagcatgaatcgatgatgggttatatcagtgtacttgttttgctttattcgggtctgatgacgggtatttatatgctgacgattatcgttcgtgcatggttcccacatgtcggttatcataaggatctggtagaagagttcagggatccgaactggctgatgaagggaccgctggttatcttttccgttttaacagtcgtgattggcttttatgcacagccgctgcttgattttattcagaaaattgctgttggcatttattaacaggagggacatagaatgattggtaatccgattttattgttattggttgttggtcccatggcagcagcagtcattggatatctgattggacgggtgaataagtctgccagagactatttcgcagatgcagtaacaatcctcacttttctggcaatggcctttttcttcctgacatataaagaaggccaggaagtatcccttgtggtccctgaggtgtgcgggatggggctttcgttcaaactggatggcttcaggattatttttgcctctgtgacggcatttatgtggatgatgaccacaattttttcaaaagaatatcttgcacatgcaagaaacagaaacagatactatttcttcctgctggtaacattcggcgcgactatgggtgttttcctgtcggatgatctgtttacaacctttgttttctttgagattatgtcccttgcttcatatgtctgtgtcattcacgatgagaaaaaagagacaatgtatgcaggtgctgtgtatcttgccgttgctgtcattggcggtatggtaacactgatgggtctgctgatgctgtatcatgcggcgggaacactgcagttagatgcgctgctttcggtctgcgaagagattttcccggaaaatgccagatggctctatattgcaggcggctgtatcctctttggatttggcgccaaagcgggtatgtatccgcttcatatatggctgccgatggctcatcctgtagcaccggctccggccagtgcgctgttatcgggtattatcacaaagacaggtattttcggtgtgattgttatttcctcacgtatctttttgcacaacggatactggggaatggtcattctgctgtttggtgtgatcacgatgatgctgggcggtattcttgcagtcttttcactggatcttaagcggaccttggcctgctcatccatgtcacagcttggttttatttttgtaggtatcggtatgcagggacttctgggtgaagagaatgcactggcagtccgtggtacaatgctgcatatgtttaaccattcaaatttaaagcttgtgctgtttatggcagccggcgtggttgttatgaatctgcacaaattgaatcttaacgatatcaggggatttggacgtaagaaaccattgctgctctatacattcctgatgggttctcttggtattggcggtattccgcttttcaatggttatgtcagcaagacattgatccatgagagcattgtggagtatatcgagcttctgaaggaaggacatggcgcagctacatttgcctttgcatccggtgcaggcgcagcggcattgtttaaagtgattgaatggctctttattattacgggtgccatgacggttgcttacatgacaaagctgtttattgttctttttgtagagaagaacagtgatccggaaattcagaagaagtatgaagcaaagacgaattactgcaataaagtgacagctgctgttcttgcgatcacagcaaccattctgccaattctcggtgtgctgccgacaatgacacttgataagctggctgatatgggtcagggatttatgtttggtgtttcaccgcatcatgccgttcattatttctcactggtgaatttgaagggtggtctttattctattgttattggtgcactgatttatgttgtgatcatccgaggatggatgatggtgaagatgaagacaggtacagttgtttatgtgaatcgttggccggaacgtctggatttgctggaactggtatattatccgattgtgatgattattttgccgaatgtggcagcattcatctgcagatgtatggacttcatgatggatggtctcatcctgctggcaagaaagacgacgcaccgtcagcttcatggaggcaagaatccgccgaaaggatacagagtgtccttctggctgggcggcatattcaatacagtgactttgtggctgaataagacaatttataagaaacatccgttaaagagagattatgtgcttcggtttgcggaaaaagaaagagttttcaaagatgccaacaagattattgttgcaagtgtatccttcagtttgctcatgttcggtattggcatcatcattacagttttatatttgttcatggtaagataaggatgccggaacacagaaatacagtctttcgaggctgtatttttgtataaaaatataagcacatattactatgtgcttaatgtgaacaaaaacaaaacatgtgtttgaagccctaaatacttctttctttttgctgtcaaatgcggtataatgaaaaacagtaaaaaacggaggaaagcggatatgccagagaaggataataccggaatgggagaacggatccagtcaatggttgaggatgcggtggcttccatggattttgagcaactgaacaggaacatcacaggctccatacagtcggtctttgaagaattgaatatacagatgccacagggaacaggacaaaaaggcagcagggcttcgaatgtgaggtatcattatggcacagagaagacgggaaaacgggcagtgaccagatatgttaagaatccgccgggaacggtgacaggacctgtctgtaccgctctgggaggtgtatttacaggaatatttgggcttgcctccattgtgatgtttgctgttcagagtgctgttccaagtgcaggacttgctatggcagggcatattactttgtccgttactattcctctgacgattgtgtcggcggttgtgatggcgaagggtatctctcttgtcggaagggttcgacggttccgaagatatacgaagctgatcggtgagagaacctattgtcaggtgaaggaactggcgtcggccgttgggaagaatgagaagtttgttgtcagggatattcagaagctgattgagaatcgggcttttacgaatggacatctggatgcgcagaacacctgtctgatgctggatgatgtcacttacaggcagtatcttgagactcaggaggcttacaggcagaggtcgctggaagagcaggagagaaagcaggaggacagaagtatttttgcatcggatggtatagagaatcctgaacttgtccgggccatggaggagggcagccgttatatcgaagcaatccgcagagccaacgatgccataccgggagaggagatatctgagaagctatacagactggaggcactgattaagaagatttttgaagtgctgaaacagaagccggaacaattgccgaagcttcgcaagtttatgcagtattatatgccgacaacgctgaagcttgtgcagacctatcaggaactggatgcacagcccacagagggggagaatatccgtcagtcgaaggcagaaatagagaagacactggacaccattaatctggcctatgagaaattgctggacagctttttcgaggatgcagccatggacatccgatcggacattaccgttcttgagacgatgctggcacaggaaggattgaccaagaatcactttgagaatcaagcagggggagaatagccatgagtgagattaaattggaagagacaccgacattgacatttgagccttttaaggaggaaccgcagctgccggttgaggaggcgcagaagcagatggcggaagcagcgccggctttggatgatagtatgctgagtgatgaagagaagcagatggtgaaggattttgcagcgcagatcgatattgccaattcagcccaggtgctgcagtatggtgccggtgcacagcagaaagtagccagtttttcagaaaaggcactggagaatgtgaggacgaaagaccttggtgaagtgggtgatatgatcacaggcgttgtcactgaattgaagaattttgatgcgggtgaagaagagaaaggccttttcggattcttcaagaagaatgtggacaaactgacaacgatgaagacaaaataccagaaggctgagacaaatgtgaatcatattgtggaggcccttgagcagcatcaggtgacattgatgaaagatgttgcaacgttggatcagctgtatgagctgaataagacatattacaaggaactgacaatgtacatccttgccggtaagcagaagctgaatcaggtcgagaatgtggatattcctgcactggcggcgaaggcacaggcttcaggacttcctgaggatgcacaggcagtcagtgatctgacggcgttagcgaaccgctttgagaagaagctgcatgatctcgaattgacgagaacaattgccatgcagatggcacctcagatccggcttgtacagaacaatgacacaatgatgtctgataagatacagtcgaccattgtcaatacgattccgttgtggaagagtcagatggtgattgcactgggggttgcacattctgagcaggcggctaaggttcagcgggaagtgtctgatttcactaatgagatgctgaagaagaacgcggagcgattgaagacagtatctgtcaatgttgcaaaggaatccgaaagaggtattgttgacatagaaacgttacagacgacaaatgaacagctgatcagtacattggatgaagtgcttcagattcagaaagacggcagagcaaaacgccaggcagctgaggttgaacttcagaagattgagggcgatttaaaggcgaagttgctttccatgagaagttccgtgcagggatagcagatagtgcgtttcaggctttcaggtgatcggcacagtgtataacagggcagttttggacatcagagctgtcctgttctgataaaaccagacagacgttatatgaggcgaagggggctgttatgacagaagaagtatacaaagaagcggcacagaatgtgacagcctggtacaggcagtatggtcgtgatctgccatggcgtcggacaggcaatccatatcatatatggatcagtgagataatgctgcagcagacgcaggtggatacggtcaagccgtattacgaacgttttattgaaactttgccgacggtggaagacctggccggggcagatgagcagcgtgttttcaaattgtgggaagggttaggctattacaggcgggcatcacatttgaaggaagctgcatccatgattgtgaatgaatatcatggccgttttcctgagacatatgaggaactgctgaagctaaagggcgtcggtatgtatacagcaagcgccattgccagtattgcttttggcattccgaagggcgttgtggacggcaatacactgagaattgttgccagattgtttaaccgggaggacaacatagcgcttcagaagacgaagaatgcttttggggagattatggatgccatgatccgttatgcggagccctctgactttaatcaggggatgatggatcttggtgcaatgatctgtaccccatcaaagccatcctgtgatgaatgtccggtggcttcattatgtcagtcaagagaatgtcagacagttctacggcttccggtcaacaataaggttgtgaataaaagtattctggagtatatgacagttgtcatcagagatggagaccggtatttcatggtacagaatgagcagggactgctgcagcatttgtatggttttgcccagtatggctgtgatatgccgtcagaatttgagaaagccttttatgatgattatggcgtgaagatacggctgacacagtatatcagtgatattaagcatgtctttacacacagagaatggcggatgcatgtatacggcggtgaagttgtcgatccggccaccaggcctatgagagatttttacaagcttgaagaaattgagcagctgccggtttcaacggcacatttaaaagtattaaaagcttatttgaaggtactgcagtgattgattttctgaaggagggatgcaatgaatattcgtgaagagagagaagcatgggaaagggcgtatttgagtccttatgcatccagaagcagcgaaacacgtggaagagaccgggaagaacaaaagtgcgatatacggcctgaatatcagagggacagagacagaatccttcattccaaggctttcagacggatgaagcataagacacaggtttttcttgccccaaggggtgaccattacagaacaagacttacgcatacactggaggtatcccagactgcaagaacgatagcaagggcattaagactcaatgaagatttgacggaagcgattgcactggggcacgatctggggcatgcaccttttgggcatgccggtgaagcggttctgaatgagatatgtccggagggatttaagcattacatacaaagtgtccgtgttgtagaagttctggagaagaacggacaggggctgaacctgacgaaagaagtcagagacggtatgatgaatcattctacatccagaatgcctaaaacgctggagggcaagattgtgagactgtctgacaagattgcttatatcaaccatgatattgatgatgcgatcagaggaagaattatcacagaggaagagctgccggacaggtatacggatgttctgggacatgattcaaaggaacgactgaatacattgatccacgatgtgatcgacaacagtatggatcagccggatattttgatgtcatcgcatgtggaagaggcgatgcttggcatgcgccgatatatgttcgaccatgtgtacacaaatccaaaagctaagaatcaggagacaaaagctcagaatctgctgagagaattatatgaatattatatgaaatatacagaacagatgccggaggaatacaggcgattgattacagacgggcgatgctccagggaacgggctgtgtgcgattatctgtcgggaatgacggatcagtatacaattgaaacgtatgaggaactttatattccgaaggcatggaagatatactagaaggatgtgacaggtatgtattatcctgatgaagtgatagaagaagtcagaagcagcaataatattgtggatattatcggcggttatgtcagacttcagaaaaagggcagttcctattttggcttatgtccgtttcataatgagaagtcaccgtctttttccgtcagcccgaataaacagatgtattactgtttcggatgcggagcgggcggcaacgtgtttacttttattatggaatatgagaatcagacatttccggaggctgtaaaaatactggcagaccgggccggaattgcgcttccggaggcagagctgacggaagaacagaaaagagaaagaaataaacgtcagctgttgctggaaatcaataagacagctgccaattatttttattatcagctgaatggggatcagggacagcaggcgagagaatatcttgagaacaggagactgtcaaaggagacacagattcattttggattggggtatgccagcaagtacagcaatgatctctatctgtacctaaagaaaaagggctatcaggatcagattttaaaggagacaggacttcttacttatgatgagaaaagaggtgcccatgataaattctggaatcgtgtgatgtttccaatcatggatgtgaataatcgggtcattggttttggcggtcgtgttatgggagacggaacgccaaagtatctgaattcaccggaaacgatgctctttgacaaaagcaggaatctttatggacttaattatgccagaacatcaagaaagccttatatgatcatttgtgagggatatatggatgttatcgccatgcatcaggcaggttttaccaatgccgtggcttccttgggaacggcatttacagcacagcacagcgtactgcttaaacgatatacacaagaggtacgtctggcctatgacagtgatggtgcagggcagaaagcggcactcagagccattcctattctgaagtctgcaggtatcaatgtccgggtaatacacatggatccttacaaagacccggatgaattcatcaagaatcttggtacggaagcctttcaggagagaatcgatgcggccgagagcagttttatgtttgaaatttctgtattggagaaaaattataaacaatcagatcctgaaggaagagcttcctttatgaaggcgatggccagacgactgcttgaatttccgcaggaactggagagaaatatttatattgatgcgattgccggccgttatggtattgcttcagaagaattaaaacgcatggtgaacagttttggtgcttccatgagcagggagcaggtggaggcggccatttatcagcagcaggaacgggaagaaatgccggcaaaaaagcgggttgagaaggaagatagtgtgctgacagcgcagaagtttttcctgacatggctgattgaagaaccgtcgatttatgataagacaaaggactatatcaatgaggatgattttgtggaaccattatatcatcatgtggctgcacttgtttttgaagaactgagggcaacgggacaggtgatgccggccagaattctgaatcaatttgaggatgtagaggaacagaagacagcagcgtcactgtttaatacaaggcttaaaaccgatgatgaccctgcagtcagagagaaggcactgaatgaaaccgtgaagcgcatcaagaagaacagtctggaattgaagagcagaagtgtcagagaaattgcagatcttcagaaaatcatcaaagagaaagcacagcttcagaaactgtatatttctctttaaaaatggaaaactactaacaacttgcccggaggaaaacaaatggacgaaaatatggcgttttttatggataaactaaaagaactggttccttttgcaaaagaaagggagcaggagctgacatcggatatgatcagtgatttctttggtcatatgccgctgacagaagagcaaatggagaagatttatgattatcttgaatcaaacggcatttttgtagatcgaagcaacgatgaaccggatcgcagaatgcttgatgaggcggaagaggagattgatccgaatgatatttcagtaccggagggaatcggaacgaatgatccggtccggatgtatctcaaagagattgggaatattccacttttgacaccggaagaggaagttgaacttgccaaagagatgaaagaaggcagcaagcaggcagctaagaagatggcagaagctaatcttcgccttgtcgtcagcattgcgaagcggtatgtagggcgcggtatgcagtttctggatctgattcaggaaggcaatgtgggcctgatcaaagcgattgagaaatatgattatactaaaggctataaattcagcacatatgcgacttggtggattcgtcaggcaatcacccggtccattgcagatcaggcaaggacgatccgtattccggtgcatatggtggagacaatgaacaagctcacaaaggtccagcgttcattgacacaggaactgggcagagagccgtctgtggaagaaattgccgagaatgtgcatatggatgtaaacagagtacgggagattttgaagctggctcaggagacggtttctctggagacaccggtcggaagcgaagaggagagccatctggctgattttatcgaagatgatcatacgccgctgccttcggatgaagccgcatttggacagcttaaggatgatatcagaagtgtccttgacaagttaaatgagcgtgaacagaaagtgctgagaatgcgttttggtctggacgatggcaaggaacatacattggaagaggttggtcaggaactgcatgttacccgtgaacgtatccggcagatagaggcgaaggcccttcgcaagctgcgtcagtctggtaagtctgcaggccttgagggctatttgaatcagtaggcggggtgaacagatgcagttatcaatacgaatgcaggccgtggctgatatggtgacgcctggaggaagaatagcggatattggtacagatcatggctatgtgccaatctatcttgttgaacagaataaagcagatcatgcgattgcaatggatgtgcgaaaggggccattggccagggctggtgagaatattgtcagattcgggtgcagcgacagaatagaaacacgtttgtcggacggattagctatgctgaaaccgggagaggctgatacagtgattattgcaggaatgggcggattgctgacgatccgtatcctggaagcggggcttaaggtacttcagagtgtcagcgaatgtatcctgcagccgcagtccgatctggacaaagtccggcagtttctgcatcagcatggttttcagatcgtacaggaaaagatgctgatcgatgaaggcaaatattacgttgtgatgcgggtgcttcatggtgaagagaggatttatacagaggcagaagatatctatggcagatttctgatcaatgaaaagcatccggtattgaaagaataccttgagaaacaaaaagcggtcaaagagaaactgctgctggcgcttaagaacaaaacatctgagaagagtcatgaacggcagcaggaacttttgcatgagcttcagatcataaatgagacgataacaaggatggtggatgaaaatgcagagcagagacctgattaagaaactggaaaaactggcaccgccggaatatgcggagagttgggataatcccggacttcttgtggggagtgccgacagagaagtccataaagtatacatagcgctggatgctgatggcggagcagttgaaaaagctgtacagtgcggctgtgatatgattctgacacatcatccgcttctgttttcagccattaaatctatcagagatgaagattttattggtcaccgactgatgatgatgattgaaaacaagattaattatttcgctatgcataccaattttgatgtggcagtgatggcagatattgctgcagacaggctagggttgaagaaccgaatgccgctggcgatggtccgggagacggaaagcgggttaaagggcattggggcttcgggaacacttgatgatgagctgacgctggcagaactggcggcgctggtcagaaaagcctttgatttgccgcaggtaagatgttatggagatccggagacgacagtcagaaagatttccatgtgcccgggatccggaaaggggatggatgccgatgtcctgaaggcgggcagtcaggtgtttattacaggagatgtggatcatcattacggtattgactgtgtcgagaaagaaatttgtgtgattgatgcagggcatcatggacttgaacatatttttgtgccgtatatggaacaatggctgaaagaaaattgtccggagattcagacagtcacagacgacaatcagtcaccgttttttgtcatatagagagtgtgtttggtatatatgggggatgtgagtatgtcaaagattcatttaaaaacaggcaaaggctgctttacatatgaggccggaacaacgctggaggctattagcagggattttcaggaagattatccgcatgatattatccttgcccgtgtggacggtaagctggcagagctgaacagctgcatggacagagatgcagagattgaatttatcacaacaggagaagctgtcggcaatgaagtttaccggagaacagccagcatgatgatgctgaaggcattccaggatgtagtgggcagagataattttgaacgtctgactgtacagtattcacttgacagagggtattattgtgaactggtgtcagatacagcggtgacaaagagtctgttggacaaggtgaagacgcgtatgatggagattcagcaggcaaagatgccgatcatcaagaaatctttgccgaagcgggaagcaattgaaatgttcagagaacataaaatgtacgacaaagtgaatctttttcactatcgccgcagttccagggtcaatatttatatgttggaggatactattgattatttttatggatatatggcatccaatacagcttatattcgctattttgatctgtatctgtatgatgatggatttgttctgcagatgccggaaccttcagcaccggaaaaagtggatgcctttgaaccgcctgagaaattattcaatgttttgaagcagtcaacccggtggggagaacttttgggtgtgcgtacggtagcagatattaataatgcactggcagacggcagctttcctgaacttatgcttgttcaggaggcattgcaggagaagaaaatcgcagagattgcagagaatataattgagagcggcaagcggatcattctgatcgccggaccgtcgtcgtcgggaaagacaacattttcacaccgattatctattcagcttcgggcccatggcctgagaccgcatccgattcctgttgacaattatttcgtcaacagagaggatacacctcttgatgcgtacggcaagccgaattttgaatgtcttgaagcattagacatcaaagaactgaacaaggatctgcagggacttctggcaggagaagaagtggaacttccgattttcaactttgtatccggcaaacgggagatgagcggcgagaaacttcagattggagatagggatgtacttgtgatagaaggtattcattcattgaatgatgccatgacctattctattgacaaggagaataaattcaagatttatatcagtgccctgacccagttgaacattgatgaacataatcggataccgacaaccgatgcaaggcttttgcggcgtattgttcgtgatgcggccaaacgcggtacaaatgcggcaaagacgatttctatgtggcaatctgtccgccggggggaagatgagaatatatttccttatcaggagaactgtgatgtcatgttcaattccgtcctgatctatgaactggctattttgaaacagtatgcggaaccgctgcttttttccgtcagggaagatcagccggagtacgagacggccaaataccttatcaagtttctgggatattttcttgggtcgagcagtgaaaatgttccacagaattccatacttcgagagtttatcggcggcagctgctttaatgtcggataataaaacagtttacatttgaaaatgaatgtgatatgatagggaacgtaagtctgtcggataatcgcggctgcaagcgtcgaaagaccgcaggtgaggaaagtccgagcttctcagggcagagtgccggataacgtccggtggaggcgactccaaggccagtgcaacagaaataaaccgcctgcttcgtcaggtaagggtggaaaggcgaggtaagagctcaccgctcctctggtaacagaggaggctctgtaaaccccactcggaagcaagaccgcatataagacgatacgtcggcccggcgtgttttagggtaggtcgctcgatcctgctggcaacagcagggctagatagatgattatcgtttccggttttccggattcacataactcggcttacagacaggcttacatcataaggattcatagagggagctgtcgcttttactaacagagattagtgaagcgtcggcccccttttcttttcagagtatgttaaggtttttgtaaggacttaacggctgcggctgtgttagaataaaaacagcaaaaaaagaggagagagacaatggctgaacaaattgaaatactggtagtagatgacgataaggaaattgcgaatcttgtagagatctatctgtcaagtacaggctataagatccataaagcgtacaatgcagtggatggtttggcgttgctgcagaaatgtgatattaaactggcgatcattgatgtcatgatgcctcagattgacggcattgagatgtgccgtagaattcgtacatgccggaatattccgattattatattaagtgccaaatcggcagatgtggacaagattcttggcttaagtgtcggagcggacgactatatgatcaaaccttttaatccgatggaattactggccagagtgaagtctcagctgagacgttatctggagctgaatccgggagtggtgccggacagcaatatgatcgaagtgcaggatgtggtcattgatacgaagaagcatcgggtaacggtggatggctgggatgttgtactgactccgattgaatttaatattcttcaattgttggcaagtcatccgggacgtgttttcagtacagatgagatttatgaaaatgtctggaatgagaagctgtatgaagcgaataatacggtgatggtacatatgcgtcggctgagggagaaggttgagaagaatccgagatcaccgcagttgatcaagacagtctggggagtgggatacaagattgaaggttaaattaacagaaagttttagaattcgcattatgctttatacatgtatcagtctgctggcggccgttttgatggatatggcagtgctgttgttttgtattcgttcgcgcatactggtcagtgattatggattgaatgaaaaaataaatcttcatgcacacagcagcaattatatgatcaacaaccagattcacgcatcaacaaagagtatgctcggtgaatcagatattttttacaggatatttggtgtgggtatcaaggtgcagctgatcattgtactgatcatactggcactgattatttttttgatggtattttttcttttgacgcgtcgtgtgatggcatatatgatgaatattctgcagggagcctgcacaatggcggatggagatttttctcatagaattgatgtgcgttatcatgatgaattttcaagcatcgcagacagcatcaaccggatggcggatactgttgaggcgatgaagcaaaaagaacaggaagcggaggagacaaagaatgagctgattacgaatgtggcccatgatctccgaacgccgctgacatctattatcggttatatcgatattgtcaacaatatgccggatctttcggaaaaacaacgctcaaaatacctgaagattacatgggagaaggctcgaaagcttgagaaactgattaatgaactgttcagcttcacaaaaatcagttatggcggtatgccaatgcgtatggagaagattgatgtcatcaaaatgcttgaacaggaagcggacgaactttatcccacattcaaagagaacgagctggaatgtctgctggagacagatgccgacagttgcatgatcatggcagacggggaacagcttgtgcgcgtatttgataatttgttgggcaatgccatcaaatacggccgatatggcaagatgatccgaattcgtacattaacagagaatacacagatccaaattcagattgttaattacggcagtgtgatcccagctgagaatttgccatttctctttgagaagttttacaaagtagatgcttccagacagccttccggtgaaggtacagggttggggcttgccatagcaaaaagtattgtagagagtcatggaggaagtatttctgccagaagttcctttgagggaacagtatttgaggtcgtacttccgacggcaggggcatatcagaatggggtggtggcatgacaggtgtacgaaacagaataggtttagttgttgttttgcttctgatattgattccggccgtttatgtcctggcagatgaggcatatatagatagtgatcgattcacagtgaatacagcggagattgacggggatattcagtttacggatgtgaccggatgcagtgttcggatgcaggtgacgaatcatggtgatgacttcgagggaacattaaagatccttcgttatgaatgcactgacggcagttatgtgtctgctgtgggaagaaccgtgcatatcaagagcggggaaacccaggatatttatctcaagctttccaatattgcttatgacgggacaccgtatcatgtccctttgcgtgtagatttcctggataaggatggacaactgctgtgtcaaaagattacggattttcaggtatcaccggacatcacaacgaaagtggcagcaggtgtttatgcggatgatgcacagaaactggctgtcattgatcaatccagatttaagtatgaaacaaccaacatttccggtgatattaccatgaagtccagacagatgacagacgaagaactggcgaatatcaagcagctgaatatcaatcttctgattttggataaagtcgtgtcggaaagcacctgggagaatgtttccgaatggattatgtgcggcggatatgcaatgatggaaaaagcgtgctgtcagaatatgatccataagatgccggatgacaacggtctggtggattggggcaagggtcggattcttgtttatgatgcatctgagtggaatggcatcatgtttcttaaatctgtcagaaatttgtttggaacggatggcatccatgcattgatcgcgggagactatagcggatattactggaatgtccaaaccatccttaattatgatattgccagtaaattacctccggtgacgatttatttcgttattttgctgatttatattttatgtataggaccggcggtctatatgatcctgaaaaaaagagataagcgggaatatatgtggctgtggattccgtgtctggcggtattattttcggtgattgtatataaagcgggcagcagtgtccgttatgcagaaccgtttatacgatattattctgttgttgatataacggaggaggcaaacattgagcagacaaagcttgttctgatcagtccgaataaaggtcgctctgtgtttagtatcgatagccaatataatctgaagcttctgaatgatatgtatttgctgtatgatgatcagaatgacaggttgacggcgctgaaagaaaaattcggagatgcagaatataacgtggccatgtctgtttcagatacaaggacagatgttatggtaaacagtgcggcaacctttgatgaagaccatttttctaatgagcggattctgaattctgagggtggaatagatgtggatgcggcttattatcgaggtgaattgactggaacggtgacgaatacaacaccgtggaatctacatgatgcgtttattattcataaggggctgctgttccagctcggtgatcttgatgccggtcagacaatcatcttggatcatctgaaagaagcccagttggtaaagagccggaatgatgtcttagatacttgggagatgaagaatgaaggcaatacagctgcagtttcggctgtgatgagcgatttgatcggcaatattacatctgcatcaagtatgacacttgcggatgatattgtgggcggtttttctatggattatgatatcggtgtgcagatcagtgaagatatcgcgtccgtagacggcataacactgatcaaagagaagacggcgatagccgacagcggcagcggatgggcaacacaagcattgatcggaccggaagaaccggagagtgaagaggatctttatgcttatgatacggacagttatatgatttatggaacagatatgctgaatgtgtcttatgtggttgaaaggctgtctggtgaactgtatttgaagtggctgaatccggatgcaggtatgagcgtttcgttttataatctttcgaccggggtatatgatacagtgtttcgggacagtgacgagatggcagaagatgatctgaagaattatattgcaaaggacggtaagatcaaagcgcatgttcaggcagcagatgccaatgaagatcattatatgcctgtatttaccgtgtcaggaggcgaagagaatgattgagatccgacatctgtataaagcttttgacaatcatatggttctcagaaacctgaatatgaagattaatgagggtgcggtgtatgggtttgtgggaccgaacggagccggcaagacaacaaccatgcgtattattgccggtttgctgaaggctgacagcggacagattctgatcgatggtgaagatatcgatgccagacataaagagctgatcggctatatgccggatttctttggtgtctatgacaggctgagagtaaaagaatatatggccttttttgcttctatttatggtcttgataaggaagaaacagagaaaaagattaggcagcttctggagcttgtaaggctgacagagaagaaagaggcatatgtagacagcctttcaagaggcatgaagcagcgcctttgtctggcaagatgtatgattcatgacccgaaactgctgattcttgatgaaccggcgtcaggtcttgatccaagagcccgttatgaattcaaggaaattatcagacaattgagaaaagaaggcagaactatcatgatcagttcgcatattctttccgatctttcagaaatgtgtacgaacatttgtattattgatgaaggaagatgcgtgatggaaggcagcgtggatgagattgagtatcacatgatcacggcttctccgcttgttatccgtacggcaggaagacaggaagatgcgatccgtctgatcagacagaatgaaatggtggagacgctttcttataatgaaaatgagattcaggcagtctttaagggtgaacgggaagatgaggttatgctgcttcatgaactgatggcagcagatattccggtttattccttcggcagagacagaagcagtcttgagacgttatttatgcagattacggaccgggaggtgaaagaacatgcgcatgaatccggtctataaaaatgaactgaagatgtcggccagatcaatgcagcttccggtgctggctgtgatttttaacagtattctgtcggttgttgctttgattgctttatatggcattcgacagaactatatcaacagcggcggaaatccgtatcattcgatgatgatactttatgttgttgtcctgactatagaagtggttttactctgtctttttgtaccatcggcagccggcggcagcattgccggtgagcgggaacgtcagaccctggacattctgctgtcatcaaggatgacggtaagggagattgttacgggcaaactgctgtcttgtatcagtatggcagtgctgcttgttgtgacaagcattccaattttagcggtgacatctatgtatggcggcatgcagctgggattactttatcagtcagcagcctatgtgggattttttattctgtttgccggaagtatcggtgttttttgctcctgccgtttcaaaaagacaacttatgcttctatatcggcttatggtttgctgattgttttgacaataggaaccggtttgctggttcttctccttaatatggtttttggcggcggatttgggcagttttcggtgacagcctctgtgtcggatatttcctgtgcatacagcagcgaggtagatatgggcacggaggtgcctacagtgcatgcagttgccggaattatctacctctggctgttgaatccggccattacctatggtatgcttatttctcatcagataggagaaatcggcatagtggaggaattattgcatcgaatgggagcggcacaggtggtagttgaacactggcttgctgtcagcgtatctgttcaggctgttttcatcatcattatgacagctttgtcgacaaaatacctggatcctcagaatgaacgctttaaagcgggcaataaaatattaaaaaagcataaatctcaataaaatcagttgcattacctttacgaatcgtgtataacagatgaaaggtatctttggatattcatttgagataaaaggagtttggtaaagtgacacaggaaagctggtttcagagattatggcgtctgattacgccggagctgatatatcttgcgatatgttatatagttgatcttgcggcagctgcttatttgagattttcaatgggtggagagtattcatcagggaattttgagaaatttacggtagttttgtctgataaactgattcagtatgcggtattgctgcagactgtggcagcgtttttcagtatattgatcctgcttcggatgtattataaagactacagaaaaagacgctttgtctttgaaaggaagagcactgcatggccatggtggggactcttgatcccgattggtatactcgtttctctggcaggcaatcttctgatcaatttgacgaatctgacagagttatctgagaacttcgaacagtcccagaagctgctgttttcaggcccttttgtgatacagattattggcatcggcatgatcattcctatatgtgaggaacttatttaccgcggtctgatctttatgcggatgcgtcagtattgcaatgtgaatctggccattggcctgtcggcacttctgtttgctgtctttcacggcaatgtcgttcagggaatttatggctttgcaaccggtgtcttatttgcgtatgtgtatgagaaatacggttcattaaaggcaccagtgctggttcatgtctcagctaatctcatgtcgctgggactctcgtatgtgaacccttcctttgcggacagagggagagtgtttatagtaggaattgcagcagcagcggtatgtcttttactgttatgggcagtggacggacatgttgcagccaggagaatctatctgaataatgcagatgcagctgccggagcgcaggaagattaagcaggcgtattgaaaacgggaaatttcaacaggaaatttcccgtttttttgaggtataagtgccttttgtccatctatcaggggcgtgattcgtcaatgaatgatgattgccgtatatttttgagtatgctatacttttaatgtcagggaatgactgaacatttgaaaatggcattgacttttcagacaagatagtgtaatataaacattagttcgaagaacgaatgttcacaaaacgcatgaaagatgtgtggtcatatataatgaatcagagtcattaaggccggttggctgtcagagaataaaggagattttgggatggataacagtgaaaagttgaaagctttggatgcagcgatttcaaagattgagaaggattttggcaagggtgcgatcatgaagctcggggacaagagtaagaacatggatgtggagacggttcccaccggttctttgagtctggatcttgcgctggggcttggtggccttccgaagggacgtgttgtagagatctacggaccggaatcttccggtaagaccacagtgacattacatatggttgcagaagtgcagaagcgaggcggtattgcaggatttatcgatgctgaacatgccttggatccctcttatgcccgcaggattggtgtagatattgacaatctttatatttcacagccggataatggcgagcaggcactggagatcactgagatgatggttcgttccggtgctgtggatattatcgttgtggactctgttgcggcactggttccgaaggcggagattgatggcgatatgggcgattctcatgtgggtcttcaggcaagattgatgtcccaggcgctcagaaagttgacagcgatcatcagtaagtccaattgtattgttatttttattaatcagctgcgtgagaaggtcggcgttatgtttggcagtcctgagacgacaaccggcggccgtgcactgaagttctattcatcgatccgaatggatatccgtcgtattgaagcgattaagcagggcggagagatcgtcggtaaccgtacacgtgtgaaggttgtgaagaataaagtggcaccgccgtttaaggaagcggaatttgatattatgtttggtaagggcatatcaagagaaggtgatattcttgatctggcagccaatacagggattgtcaacaagagcggcgcatggtattcttataatgatgccaagattggccagggtcgtgagaatacgaagaactatttccgtgagaatccagagattatggaagaaatcgaacataaggttcgtgcgcactttggtctggaggcagaaggaaacgatgaaaatgcaggcggtcagagatcagacagtgtgaaaaagggttctgatgtgactgcttctgagacagtgacggagaatgaataagaataatgacagttacagcgattgagtctgtgacacgacataagatgcgggtttccttggatggggaacctgcatttgtgttcacggacaaggagataagagagtggaatctggaagaagaaatggtgctggatgactcggaggaacaggcccttttacagtatgtcagccgtgaagcggcacgcacagcgatgaatcttcttgtgaagcgggattatgctgaggcagagctttatcgaaagttgagagataagggatacagtgagttttttgcagggaaaggcattgagtatgtatcggcctatcattatcttgatgatgcacgttatgcaagacagatgatcgggagtcggaaggacacgacgagccggaagatgatggtgagtaggatgcggcagaaaggactttcagatgaagtgatccaggaggcaatggaagaggcggattggacagatgaaatggggcttacaagagagctccgaagacgtttttcttcagcagagcagatagaatcgctgacagataaggacagacagaagctgatccagtcactgatgcgcaagggatatgggtacagtgacattcaacatgtgatccggcatttagatgaattggaggaaggtacaacatggaattgagtattcttttggcagagcagattttttcgcttctgttaatggtattgacaggctatgtggtacgcaagctgaatgttgtgccgaaaagcggcagaaaggttttggcttccattgttctctatgtgtcagcgccgtgtatcgtatttgattcttttcagattgaatattcttcagagaaactttttggccttgtggttggatttgcagcagcttgcattgcactggcggtttttatatgggcagcttctgtgtgcaagaagatttttcatttgtcagcttcagaacagacatcggttacttatgcgaatacaggcaatatgatcattccgttggtgaataatatactcggttcggaatatgtgctgtatacgagcccttacaattgtacccagacagctcttctctggatccatgcctataatctgatcaccgggaataagaatgttcaattgaagaagattttgctgaatcccaatatcatagcaatggtagcaggcctgatcttctttttactgggtatccagcttccgggaccgctgcaccatacagtgactcagctgggcagcctgatcggacctttaagtatgctgaatgtagggtttattatggctgaagagaatctgctggatgtatttaaaggcaggaagatatggcttgtgacgattctgcgtctgatcattctgccgatgattatgatcttttgcgtgcgcctgacggggataacattcagatttccccagacgaaaagtgtattgctgatctcactgttggcagcagcagcaccgacagcttcatctattgcacagtttgcagagattgcggacaatgatgctgttccggcaggaaagatcaatatactgtcaactttgtgctgtatcattacaatgccggtggtgatcatgatttatcaagtgctgtgttaatgttttaaccaaagataaatagtcacaaaattttgacaattcaaggggttttatgcataggatacttgacataagttcaaaaaaagtataaaatttaagtgttgtattctaatacaatgaaattaaataaggaggtgctcctgtgccagtaatagctattattgtgcttgttcttggcattctcctcattttagctggactttatctgatcaaaagcaataaagataaagctgagaagattggcaatgcagaagaaaaggcccgtaacattattgatgaggctttgaaagctgcagagaccaagaaaagagaaggtttgttggaacttaaggaagaaactttaagaaacaagaacgaactggagagagagagtaaggaacgtcgctctgaactgcagaagtttgagaagcgtgttcttgctaaggaagaagcacttgacagaaaggcagattcacttgagaagagggagagccagctgacttcaagagaagacaagctgaacaaacggcaggctgaagtggatgctctgagcgaaaagagagtacaggaacttgaacgaatctcaggtttgacctccgaacaggcaaaagattatcttctgaagactgtggaagatgaagtgaaacatgaaacagcaatgttagtgaaggaacttgaaaccagggcaaaggaagaggcaggaaagaaagccaaagagtacgtggttaccgcaatccagaaatgtgcagctgaccatgttgctgagacaacgatttccgttgttccgcttccgaatgacgagatgaagggacgtattatcggtcgtgaaggccgtaatatccgtacactggagacgatgacaggtgttgatctgattattgatgatacaccggaagccgttattctttccagttttgacccgattcgtcgtgaagttgcccgaattgcccttgagaaattaattgtcgatggacgtatccatccggccagaatcgaagaaatggtagagaaggcgcagaaggaagtcgagacaatgattcgcgaggaaggtgaagcagcaacactggaagttggtgtacatggcattcatccggaacttgtacgtctcctgggtaagatgaagttcagaacaagctatggtcagaatgcgctgaagcattctatcgaagtagctcagttatcaggtttactggcagctgagatcggcgttgatgttcgtatggcgaaacgtgcgggattattgcatgatattggcaagtctgttgaccatgagatggaaggatctcatatccagattggcgttgatttatgtaagaagtacaaagagtcaccgattgttattaatgctgttgaatcacatcatggtgatgttgaaccgacatcgttgattgcatgtattgtacaggctgcagatactatttctgctgcaagacctggtgcaagacgtgaaacacttgaaacctacacaaacagattgaatcaattagaagatattaccaacagctttaagggtgttgagaaatcttttgcaattcaggcaggtagagagattcgtgtaatggtagttccagagcaggtaagtgatgcagatatgatcttacttgcaagagatattgcgaagcagattgaagcggagcttgaatatccgggccagattaaagtaaatgtaatcagagagtcaagagtaatggaatatgcgaaataacttgcattgagtgagtgtatatccgacaaacgatttgtttataaactttgatagggaataatagaggcagaatagatcagtgatcaggattctgcctctttttatgcgataatcttatgtatacttgggaaaatgttagtactttgcagaaaaagtgaaatgtgatatagtggtagtatatgttgaaaagaagaaagggtgtaaatataatgagtgaaacatgtaatgaatcaagctgcagttcatgttccgtagagggatgttcatcaagaaaagcagcagatatgaaggaaccagccaatcagtacagtcatattaagcatgtgatcggtgttgttagcggtaaaggtggtgtcggcaagtcactggttacatcagaactggcagtgaaactgcatagacagggatataaagtcggtgttttggatgcggatattacaggaccatctatcccgaaggtatttggtattcatgagaaggctgtgggtaatgataaaggtgtatttcctgcacagacaccggaaggcatcaagattatttctgtcaatctgatgttggacaatgaagaagatcctgttatttggagaggtcctgttattgcaggcgtggtgaaacagttctggaatgaagttatctggggagatctggattatcttcttgttgatatgcctccgggcaccggagatgttcctctgacggttttccagtctctgccggtggatggcgttatcattgttacgtctcctcaggaactggtagaaatgattgtcaagaaagcttataatatggcgaagatgatgaatgtaccggtacttggtcttgttcagaatatgagttacttgctttgcccggattgcggcagaatgatttatatttatggtgaaggcaagggagaacagacagctaaggaactttctattccatcctatgcaagtcttccaatcgatccgtccattgcagctttatgtgatgccggcaagattgaggaattcgatcatccttatctggatgcaatggtgaaatacctgtcatctttaaactaattcacactaaagggagagaacatgtttactatcagagaatatgccatgcctgagacactggacgaggcctatacaatactgaaatccagaaaaggtaatcagatccttggcggatgtgcatggttacgattagggaaaaaaagaattaatatcgcagttgatctgacaaaatgtggtcttgattacattagagaagatgacgaacagatagagatcggggccatgacttcttatcgcagtgtggaaacctgtgatattctgaagaaatattttaacggtgtgatcgccgactcagtttcttctattatcggtacacagtttagaaatacggtgacagtgggcggttctgtctacggccgttttggcttttcggattttctgacaccgcttttgacgttggatacatctgttgtactctacaagagaggaagcattccgctggagacatttatgacgatgccttatgaaaaggagatcattgagaagattgtgatcaagaaagacggacggcggtcctcttatcagatgtttcgcaattccagaggggatttccctattctgaatcttgcggccagcaggacagaagcaggacagtggattgtgactgtgggagccagaggaccgaaagccatcagggcggagaagacagcggcttttctgagtgacaaattgtcacagaatgcattgaaagcggaagatgttgaagctgttattcaagaagcaggagaaatcctcgtcagtgaagtgacgtttacaagtaatatgagggcaagcgcagagtacagacgtattcttggcaaagtgctcttaggtaaggcagtcagggaggtgatggcatgctagttcatatttttatcaatggagaaaagagaaaagtgcattgccagcctgatgccatgcttttggaagtactcagagatgctggctgcaagagtgtcaaatgcggctgtgatacgaccaactgcggtctttgtactgtatggctggacgggaaaccggtgctgtcctgttctgttccggcagccagagtgaatgaacgacacgtgacgacactggaaggtattcaggatgaagcggaagctttcggtaagtatctggtgggcgaaggcgcagagcagtgcggtttctgcagtccgggactcattatgaatgtcgttgccatgaagaaagaactggatcatccgacagatgatgagattcgtcactatttggaggggaatctctgcagatgtaccggatatatgggacagatgcgtgccatcagacagtatgtggatgaggaggtagaagcatgagatatgtcagccagcctgtaaagaaactggatggtatgccgatcatcaaaggcaagcctctttataccaatgatctggctccgaatgagtgtctgatagttctggccctcaggagcccttatgcttacgcaaggatcaaatccatcgatacaagcaaagcaatgctggttaagggtgttgaatgtgttctgacgtacaaggatgttccacatgtgagatttaccaatgccggacagacttatccggaatgctcggcttatgaccgcctgatcctggatgaatatgtccgttatgtgggtgacgaagtggcattagtggctgccaacaatgagaaagcagcccaacaggcactgaagatgatcaaggttgaatatgaagtccttgagccgatcctggattataaaaaagctgtggataatccaacgattgtgcataattatgatgattatttcatgcatattccaagcttcaatgcggacaataagcgtaatattgttgttgacggcgtggaagagcacggggatgtggagaaggaatttgctgagagcgaagtcatcgcggagggcgaatatgaagttcaggctcaggaacagtgtatgatggagtctttcagaacttatacttatctggatcatatgaatcgtcttgttgtggtatcttcaacgcaggtgcctttccatgtcagaagatcccttgccagagcacttcagattccacagtccagaatccgtgttgtgaagccgcgaatcggcggtggttttggagccaaacagaccattgtttccgaatattacccggcgattgtgactttgaagaccggcaaggcagcgaagatgatctattccagaaaagagacattttcctgttccaacagccgtcatcagatgtgcatcaaagtccgtgtcggcgcagataaagagggcaatatccatgtgattgagttggatacattgtctaaccagggtgcttacggcgaacatggtacaacgaccattggtttgtccggtcataaagcaatccctctgtacaatcaggcgagagcccatcgattcaaataccgcggtgtttacacgaacatgatgcctgcggctgcattcaggggctatggtgcgacacaggggcagtttgcactggaatccactgtgaataaactggcacatatgctgaatatggatccattgctgcttcgagagaagaatatgctgcgtatgggtgaaatcatgccggcttattacaatgaaccccttaacagcagtgcattggatcgttgtatccagcgtggtcgggacatgatcggatgggacgagaaatatccgtgcaaagagattagtccgacaaaagtcagagctgtcggtatgtctatttccatgcagggttcgggtatttcaaatgtagatacagccggtgctgagatcaagctcaatgatgatggcttctatacactgaagattggtgcaacggatatgggaaccggatgtgatacatctatgacccagattgcggctgaaacgctgctggctgacattgatcagtttattgttgcaggtgtagatacagatatttcaccttttgacccaggatcttatgcctccagcacaacctatgtgacaggtatggctgtttataatgcagcctgtgacctgaagaacaagattatcactgccggagcgaagatgatgtatccggaacgttttcttgatgagacagacaaggtgaatccgaaaaaattttactttgacggcagcagagtgatggaagtgtcaacgggcaagacaatagcccttcatgatatagccgttcattgtgccggcacaagcgatggtaattatttaaacggcacaggtttttattcaagtccagtgtcaccgccgcctttgatggctggttttgttgagattgaactggacaaagaaacaggtaagtttgacatagtagattatgtgggtgttgttgactgcggtacgatcatcaacagcaatattgtccgcggacagacagagggcggtatctgtcagggtatcggtctggccatgtatgaggacgttcagtatgatgccaaaggtcgtatgatgacagattcctttatgcagtataagatcccgaatcgtgtggatgtgaagaagatccgtgttgaatttgaatccagttatgaaccaacaggaccttacggagcaaagtccatcggtgaaattgttatcaatacaccgggaccggccattgcagaagctgtttataatgcctgcggtgtacgtgtcacatcactgccgatcacacctgaaaaggtcaagatgggtatgatgaagaacgaactggagaaacggaaataatgaaagagtatcggattcatgttgaagaattgctggatccgctgtataggcatggctgcagggtgttttcagtcgtcggttccggcggcaaaacaacattgatccgtcaggcggccatgcattatgccagattatatcaagtgggagttgctgcttcaacaaaaatgtgtcttccggatgggcagtgggaatataaaggctgtcctccggctgttgtgtcgtctgacgggcagggagatgcgaagaggcaggcggctcctgtttgtttttatacggaacatattctgccgtcaggcaaaatctgggatctgggcgagcagatgttagggcaggcactggaagaaagtgatctgcttttgatagaagcagacggatccaaccgaaagcctttaaagggctggagagaagatgaaccggtcattcttccggcaacagaagccaccattggtattttgccgatgcattgtctgggagagatccttgatgtgacaaaggtgcatcgcatggagaaatttactgcaataacagggttagaacccggtgatgtgatgacagagaaagcctacttgcagctgattacagcggaaaatggcctttttgggcatagtcttggcagcagatggctggtacttaatcgagtaaatgatccgcagctttatcagtctgcaaagaagattgccgaagctgctgtgacatcaggtgtcatagacggatggattgcggggtgtctggagaatgaataatccgacagcggggataacggctgtaatattggcatccggtttttcaaaaagaatggggtgcaataagttattgctgcctgtggaaggcaaagcgatgatcgcacatgtttttgatgcggtcagacaggtggaatttgagcagacggttgttgtgacgggatttgacagcattgcacagctggcagttggaaatggctttcaggcggtggataatgacaaccctgagataggacaaagccattcggttgtgctgggggtacagaaaacgtcacaatcggcaggatggatgttttttaatggcgatatgccctggctgaaatcggataccattggaaaattgctgaaatatgcggatgcagtgcatattgtggtgccaaggtatggcagccgtccggggcagccggtttatttcccggctgcttttaaagcagaattactggctttgacaggagaccatggcggacggaccatcatacgcaatcatccggatcgagtctgctatgtgcccattgacaatatcagacagggcgtggatgttgatacgcctgagggttatgagaaggtaaaagggggagattgggttgaataagacgattattatcagaggcggcggagacctggcaacaggaaccatcagctgtctgcatcagtgcgggtatcaggtactggttcttgaaatagcaaaaccgacggctattcggagaagtgttgctttttctgaggctatgtatgatggggagacagaggttgaggggatcaaagccagaaaaattacgcagttttcagaggcagaggcctgttggcaggatggggttatcccgattatctgtgatgaaaaagcagaagcagtcaaagcagtaccacattttgcttttgtggatgcggctattgctaagagaaatctcggaaccaccatcgatatggcggattatgtcattggactggggccgggatttactgccggcgtggatgtggatgtggtcattgagacaaagagaggacatcgtctcggacgtattatccgggagggtcaggccattgccaatacaggtatcccgggtattatcggcggttatggcaaagagcgtgtcattcattccgagaatgcaggtgttttccatggtattgcccatatcggagatctggtgaaaaagggcgatctcatcgcgaaggttgatgatgcaccggtgtatgcgacactggatggtgtactcagaggtattctaagagatggcttaccggtaccggagcattttaagattgcggatattgatccacgtttatcagaaagagagaattgctttactatttcagataaagcaagcgccattgcaggcggtgttctgcgggccatttgtatctatgaaaacgggcttcgcagcggagaagggagaaaataattatgaaatgcatacctgttcaagaggcagtggggtctattttgtgtcatgatattacccagattctgcctggagaatttaagggacgtcgttttaagaagggacatattattcaggaagaggatattccggtgcttttgtcccttggtaaggataatatttatgtctgggaaaatctgccggggatggtccatgaaaatgatgcggctacttttttgaaagatattaccatgggagacggtctgacttttggagaaatcaaggaaggcaagattacttttacagcagcccatgacggccttctgaaggtggatgcagaccggttattccagcttaatatgctgggagagatttcatttgccagtcttcacaataatctgccagtgaaaaagggtgaagctgttgccggaacccgtgtcattccgctggtcattgatcagaagaaactgaatgaggcaaaaaaacttctggatggccataagattattgaagtgaagccaatgaagtcttttaatatcggtattgtgacaacgggcagtgaagtttattatcatcgtattaaagataaattcggcccaatcctcagaggcaaaatggaaggctatcattgtacggttgccggtcagacttttgtgccggataataaagagatgattaaacaggccatcaaagactggttggataagggtgctgatatggtcttctgtacaggcggtatgtctgtggatcctgatgatctgacaccatcggccattcgagatacgggatgtgaaatcattacttatggtacgccggtgcttccgggagctatgtttcttttgtcctattatacagacggcagaccggtactgggacttccaggatgcgtcatgcattccaaagtaactgtatttgatctgatctttccgagaatcctggcgggagagaagatcacaatggcagatattgcggcctttggacatggcggtctgtgcagcaactgtgcggaatgtcattatccaaactgccattttggtaaataggaggcgaaacatcggtagttcttggtggacataaaaaatatcagtttcagagcaggcacgtttgcactgcccatttctggcagcggtacgtaaggtgctaaaggacagcacctaagtaccggccgaaatggaagcacctgctctgaagctgatattttttatgtccattcgaggctattgacgtttcgcatagatgttatatgcagctcctgcttttgaatggctgtttttatgttctaacagaagaattattgatgtttcgcattgagataggcgagcaaatgatgagttcggagaatgacattcctgtaaatataattcagttagtaatgcaaataacgcctgaacaaagactatggtagtctgttgttcaggcgtttgtacactataagtaaatataaaactttcagagaatgttataagtcggcttctgtgaattcaatgagtccgcgtccgagtttggatactctggcgagggagcgaacttcgtagccgttgtcttcaagacgcttacgaccgcgctggaaagccttctcgatgaggatggcaattcctgcgatgcgggcaccgcccatttcaacaaggcgtgttgcaccggtggcagcttcgccattagccaggaagtcatcgataacaagaacaacatcatccggctgaatataattctgagataatgtcagttcatagctggttccctttgtgaaggaagtgatgttggtctggaatacgtcgcctgtcagaatcttggatgtctgtttcttcaggatcaccattggtacaccaagttccatggctgtgtaaacagccggtgcaataccggaactctcaatcgtaaatactttggtaacgcctttatccttgtaataagaagcaagtgtcttgccgatttcactcatcaaaacaggatcaacctgatgattgatgaagccatctactttaagaacggtttcgctgagagccctaccctcggatcgtatcttttcctctaatagtttcattattttatacctcacaactcttttatgacattatagcacataaaattcgtcaattaaagtcaatttgtcactaaaaaaaagatattttcgctctatttcattcacatattgatcataaaattttatttcagtaagtctgcaatacagattttgaaatcgctgtaaatggtgacagggatgatttcgtcaaaagcgtattgaacggaattttcttctccttcaaatgaataggtctgaatggtatctttcagtggattaacaatccagtattcacgaacaccggcagtacggtatttgagcaatttggtaagataatcaaggtgctgactgcttggagaaacaatctcaataatccaatccggagctccattgcagcctttatcatccaatttgtcgggatcacaaatcacagacacatccggttcgacatagtttttattatctttatttaaaaatacggcaaatggtgcggcataaacttcacaatttccatgatgctcagaaatatagtgattgatgcagctgactaactgggtagagattttctgatggattcggctgggcggcgccatatcgtaaatttgtccgtcaatgagttcagctctttggccatcgggaagtgcataaatatcttcaattgtataagcgttatgttttggtaatggcatatgatttcccctttcaatagatttttactctgaaaatattataacatagtcagaatatataaatctatagggtattcagagtatcgctggttttgaatcaggtttgtttgccaaagcgactggcggatataaaaagtgccagagtaaaaatcaatacggcgcaagggataaagggaaaaagctgtaatgcggtatctgcagtgacttctgttgtgaatgcctgcagagaacgggagactaaatatccactgtaacaatagggataaagaaaccatgccggggtggcacctgccagaaggccgggaatgacaagcagaagattcagccctacagagaggagaggcttttcaaacaaaacggtcagcatccacattacagagagacttggaagcatggttagaaataatcccgcacaccatttcaaaaggtaggaaaggggcagggtttctgtgatgccggaagtaacgacagcgatgtatccggcaatcacgaaaacagccagaaatacaagaatttccatcaacaggtaaaaaaccagtatacagaatttggccagtgacagggtatggcggttgactggaagtgccagcatcttgagcagcccgttgtgactgttttcctgtcccgtaatcatgacgcagacaacgatcatgctgaaaggcagcagatagtaggcgtagagaagggcactctgaataaacatggcaggccatgcctgggtgtattccggggtaaaatacgtactcagattggcaacgccggagctaacaaccagaatcggggcaataaagatgaaaggtatgattttggaacgtttgcatttgatgcgttctatttttagtaatttgagaaaatgcatttgatgacctcctattcatagtggatattggcggatgtccataggccggcagccagaaacagcagggtttcaacgatagcaatcgctatcacagatacatctggcctggtgctcatggaaacggcaggttttaacataatgacaaatgggtctgcaagaaacaggccgattttcggtacgccaagggccatgccgcttaaaaatcctgcaacacctataccaagggatatccacatattttcaaagcgggaggcgatgaagagcatgaaggataaggcaggcattgcggtgattaaggaataaagggcaaagataatcagggtgtacagctcaaatgtgccttctggcaaagatgtaatgccgatttgagttagcgccagattttgaagtgctgcggcaacggaaagcaggatggtcagaatcaaaaatttgcacaggtacatggcaggaacatgtataggcagcacatacattttttttacggcgtttcctttgaattctatgttgtagatcatacaggcggcaacgatgatgccaaacagattcagcgtcatgatcataccgtaaagctgcgtcagcaaaatggtcataggtgccaggggtagacttaacagggtatcttttcggacaatgaaattgagtaaagcatatgcaccgcctaaaagacccagggcgggcataagcaaaatgataccggttcttttttctttcttaagttcgatgatcagtgttttcatagctttgccctctgctttctgcttagattgtcctgctcgatcatggacaagaacatgtcttcaagatgatctgccgagaagccgcgctgcagggcataatgtcgaagttcctccaattcgccttcgaataacagccgtccgtggttgagaataccgatatcatctgccattaattcaatttccgacaacatatgggaggaaataagaacagtacagtcataaagtgcaggcagagattttatcagattgcggatttcatgaatgccggaagggtcaaggccgttggtgggttcatccagaatcagaatgggcggacggccaagaagtgcttctgcaaggcctaatcgctgcttcatgccaagggaatatttttttgcaagacggttttcaaactctgtcagtccaacaagggccaatgcgtcatccaccgcatgtttcggtaaacccagaatacggcggataatgtcaagattttcccggccggtcagattggcataaaagaagggcgcttcgatcaatgaaccgattccttttaaaatctcaagacggtcatcgggaaaatgtttgccgttgatggtgaaactgccctttgtgggggtggtcagcccaagcagcattttcatggtggtggatttaccggcgccgttgggaccgagaaaaccatagattcttcccttttggatgtgcagggagacatcgttgacagctgtaaaggatttgtactttttggttaaatggcaggttgtgatcatattgttcatatctgtgactcctttcttttttttagcataccggatctgccttgcatcagcattgccgcagccttacatttgccttacattttggcggcaagcaaaaaatcccggaattctatgataaaatgtaactgttcagagccaagcaaaatttcaaaaaacaggtataaaatgcttgcatttttaagactgtttttgaaattttatttggcggatacgccacaccgacgaaatgcgtagcattttggaggttagctctgaacagttacgttaaaataagaaaaaaggagaagggagaataggaatatgagtgataattaccttttgcataaacgaattctggttgttgatgatgagcaggcgcttttggatatgatttgttctattctgcaagcgtatggatttcaaaatacaacaactgcgaaaagtgtcagggaagcattgatggaggcagaaaagtgtccgccggaactggcgatattggatgtgatgcttcctgatgggaatgggtttgatctgatgacacagttaaagaaaaaaggagattatccggttttatttttgacagccaggggagaagatgaggacaagtttcgaggtttcggtctgggagctgatgattatatggtcaaaccgtttttgcccaaagaattgctatttcgtatcatggccattttgagaagatgttataaagatgaaaatcctctggtgcagttgcaaaacagtcagattgattttgcccgggcggaagtgattaaaagtggtatgcatattcctttgactgcaaaggaacataggctgctgtgggcattgtaccgcaatgcaggctgcattgttacaattgatgctttgtgtgaggctgtatggggtgataatccttttggctatgaaaattctttaatggcacatatacgccgtatcagagaaaaaatagaacaaaatccgtcacagcctgtttctctggtgaccattaaaggattgggctataaactcaatgtggagggcagataacatgaaaagtgctgcgaaactgatacggcgttttgtgagcattctgcttttgagtgcagtactgcttgttatcattaatgtggctgtctatgcggtattggtgtcagaaaaagcgcccacggaaacaacctctccgtatgatatcgcagaaaaagccggggaggcattgcaggtcttgccggatggcacatattgtctttcggaagaggtatcttctgaattagaagaaaaaaatatatgggcgatttttatcggcaatgataccttgcagaccgaatggaaaagtcataatgtacccgagatgattccgaatcattacagtttatctgacattgcagctttaagtgttggctatctcaaggggtatcccacctatgtggggaacaatgaaaacgggattgtggtattgggattctcaaaggacagcttttggaagcacatgagagccagttgggattacagtctgattcgtgatttgccgtatatatttttgaaaatacttctgattaatctggtactgatacttgccatttatatgttggtgaatggtaagcttttgaagtcggtccaacctatgatcaaaggtattcagaatttatcagctggtgagcctgtgcatattccggagacaggggtgctttcagaaatctgcacgaatattaatcgtgcttcggatattttgcagaagcagcaggagcagctgagaaaaaaagaaagggcaagggccaactggatcgccggtgtttcccatgacatccggacgccgttgtctgtggtgatggggtatgccggacagctggaaaattcacatcatctttcagaggatgaacgtaaaaaagctgctgcgattgtgaagcagagcgcacggataaaaaatctcatcaatgatctgaatcttgcctcaaaactggaatatcatatgcagccgttaatgaaaaagcgggagaatgccgttgccatcgtccgtcaggtggtggtggattttatgaatatggccgtggatgacagatttcttattgaatggaaaacggatgctgcattgcaggtatgtgaaatagaggcggacagggaattgctgaaacgtgccgttgtcaatttgctgcaaaacagcatggtccataatgagaacgggtgtcaaatcgatgtgtctgttgaggcaaaagacggcagctgcatgatttgcgtggatgataacggagagggtgtttctgatgaacagattgaaaagcttaaccatgtgcctcattacatggtctgtgacacgaatgtggatggacaacagcacggattgggacttttgatcgttaggcagatcatagagggacatggcggagcaatgacaatctcccgcggaacctacggaggctttcatgtgacactgataattccatgtgaaaaaatcacacatttatcataaatctctggtatactgtaaatacaatatgaaaatggagaagaatacccaagcggaatgtgaggtagagtatatatggaaagtttgaagattttagtggtagatgatgagagcagaatgaggaagcttgtgaaggactttttgacgaagaaaggatttactgttattgaggccggagacggcgaggaagcggtggacaagttctttgaagtgaaggatattgcactgattattctggatgtgatgatgccaaagatggatggctggcaggtatgccgtgagatcagacagtactccaaggttccgattattatgctgacagctaaaagtgatgagaaggatgagctgcagggctttgatctcggcgtggatgagtatattacgaaacccttcagtcctaagatccttgtggcgagagtcgaggccatccttcggagaagcaatgtgctggcggcagatgataccatggaagccggcggtattgaactgaataaggctgcccatgaagtactgattgatggcaagtctgtagaactcagctataaggaatttgaattgttggcttatttcatgtccaatcagggggtggccttgtccagagagcgtattctgaacaatgtatggaattatgattattttggtgatgccagaaccattgatacccatgtgaagaagctcagaagcaagctgggagctaagggcgagtatattaagacaatctggggtatgggctataaattcgaagtcgatcagtaagaggcggtagtatgtttcgaaaaaaatcattaaaggtcaaattatcgttgatcctcatcggaatggtattgctgatatctgtttcgtctgtgctgctcagtaatatttttctgaagaggttttatctggccaagaagaatcagacgctgatttctacatttgagaagattgacgatatgtatgcggcggagctgcaggggaagacgacagaatccggggaaagcagcagtacagatgagagtttgggaagctatgctataccagacagcggtatttccgatgaactttatttgcagttggacaaactgagccagacaagaaatctgtcggttattatttacagggatatgagcagtccgatttttgattatatgctcaagagcaatacgaaactgcttttatattcatctctgggcatgaatcagaacagcaaggttgagagcagtaatatttacagcgattatatcaatgcggacaagtccggtgatgcagcctcggttaagacggatagctatgagattgagaaagtcaatgtcaagcgtctgggtgcatcgtatatctatcttgccggtacatttaagaatggagatcatattttgatccgtgcctctttctcaagcattacagaaagtgcagcactgtcgaaccagttttttctatatatttccctggttgccgcgcttatcgggtttgtggtgatgtattttgtcagcaatcgctttctgggcccgatcactgtgctgacgaatattgcaaagcgaatgtctgaactggatttcacggccaaatacgaagtgaagacagaggatgaagtcggtgttctcggaaatagcatgaatatgttgtctgagacgttggaacaggcactggcagaattgaaagaggccaatacggagctgaagaaggatcttgagaagaaggaacagatcgatgccatgcgtaaagagttcctgtccaatgtatcccatgagctgaagacgccgatcgctttgatccagggatatgcagagggcctgatggacaacatcaatgacgatgaggagagtaaagagttttactgtgaagtcattgtggatgaagcccgcaagatgaatcagatggtgaaaaagatcatggatctgaatcagctggagtttggctacaatacagtgactatggaacattttgatatcattgccatgatccgtgcagtgatcgccaagtcagatattttattgaagcaaaaagagatcaatcttgcctttgatgaggatgcgccaatctacgtatggagtgatgcgtatatgtcagaagaggtatttacgaattatctgaccaatgccatcaaccatgcagatggggagaaacgcattgatattcagcttgagaagaaggaaaagacggttaagattacggttcacaataccggtgagcagataccggaggaagatctgtcaaaactctgggataaattctacaaggtggataaagcgagaacaagggagtacggcggcagcggtgtcggcctttccattgtcaaggcatccatggagcagctgggacagccatacggcgtttacaactgtgaggatggcgtttccttctggtttgaactggattgccaggatgcggcggagatgatccaggaacaggcataagggagttttggcggaatgatggatgtcagaatctttataaagatcatagaattctgataatgataaagaggcttttgcatcaattgatccagaagcctctttgctgtttgtatgtagaaatcgattcgcaataacgtgttgggttatgctgccattattcatacaatttgatatgacctgaaaagtcgccgttaatagtatagtagcaggcgtcatcttcaggttttgcataaatatttaaatccttgatgtctttgatcttgttgccttctgcaacccagatctctttgatcttggcgatcaaagccttttcttcaacctgtctgccataagattctacgtaaaatgccgttttcatataaatagcctccttactttaccttatgaataaaaacatacatatttatcatattacaaaacgtcttaaaaagcaaatgtaaatgtaacataaatttcctttggatttgaagaaatacagacaaatataactaaattgcagataatttgataaaatatctggtacagatggtgatgatgtggtaaaatcgaagaaacattaactgttgcgtgctaacgtaagaaagtatagcagcctgaaaatggattttgtttgctatacctttggaagcgagttttgaaataaatggaggataacctatgatagcgatcatcgactatgatgcgggcaatatgaagagtgtggagaaagcttttcagtatttaaatgaagatgcagtcataacaagagacaggaaagcgattttggaggctgaccgggtggtacttccgggcgtaggtgccttcggtgatgctatggagcggcttcacagctatgaccttgtggagaccattcaggatgctgtgaagtcaggaaagccgtttctcggtatctgtctcggattgcagctgttgtttgacagcagtgaagagacgccgggggtaaagggcctgggtctgcttccgggggaaatccttcgtataccggcggcagaagggctgaagattccacatatgggctggaattctattgatattaaggaagacagcaggctttttgaaggaatagaccgtcagtcgtatatgtattttgtacattcttattatctgaaagcaaggaatcctgaagatgtggcggcaacaacctggtacagtacggatatccatgctgctgtggaacatgataatatttttgcctgtcagttccatccggagaagagcagtgaactgggtcttagaattttgaagaattttgctgatttacggttgtaggacggaggaaagatatgtttacaaagagaattattccatgtctggatgtcaataacggacgtgttgtcaaaggtgtgaattttgtgaatctgaaggatgccggtgatccggtggagattgcggcagcttatgatcaggccggtgcggatgaagttgtctttctggatatcacagcttccagtgatggaagaaatacagtggtggatcttgtgcgcagagtggcagaaaaggtgtttattccttttactgtcggcggcggtatccgtacagtagatgatttccgcgcggttttgcgggaaggtgcagataaggtttctgttaattcagcggccattgaccgtccggagctgatccatgaggcggcggagaagttcggcagccagtgtgtggtagtggccattgatgccaagaaaagagccaacggcgaaggctggacaatttataaacatggcggtagaatagatacaggtattgatgctgttgaatgggcgaagagagtctgtgatctcggtgcaggtgaaatccttctcaccagtatggactgcgatggcacaaaggctggatatgatattgaactgacaagggctgtagcagaagcggtttcagttcctgtcattgcttccggtggtgcaggtacaatggcgcatttttatgatgcgttgacggagggaaaggcagatgctgcactggcggcttcactgtttcattacaaagagcttgaaatccgggatttgaaagaatatcttgcctcccgttcagtcagtgtccgattataaacagttactattattttatgaatgggggaactttgcatgggagcaatcgccaatgactggctggaaccgttgaaaccggaatttgccaagccttattatgcgcaattatataagaaagtgaaagaggaatacacgacacatcagattttcccgccctcggatatgatttttcatgcttttgaggtgacacctttagaggatgtcaaggtggttattctgggtcaggatccctatcatggggatggacaggcacatggactgtgtttttccgttcagcctcaggtggcgatcccgccgtcactggaaaacatctacaaggaactgcaggatgatctcggatgctatattccaaataacggctatcttgagaaatgggcgaaacagggtgtgctgctcttgaatacagttttgactgttcgtgctcatcaggcgaattcccatagaggaatcggctgggaacagttcacagatgcagctattaagatattgaatcagcaggacagaccgatcgtgtttattctctgggggcgtccggcacagcagaagaaagccatgctgaacaatccgcatcatctgatactggaagcaccgcatccaagccctctttcggcttacagaggatttttcggcagcaaaccattcagtcagacaaacaggtttctggaggagcatggtgtagcacctattgattggcaaattgaaaatatataactgttcagagccaagcacaatttcatataactgacataaaatgtttgcatttttaaggcagtttatgaaattgtatttggcggatacgccatactgacaaaatgcgaagcattttggaagttggctttgaacagttgttttatagaaaaacagcagttgttttttgacaattcacgttatacaattcattcgctaaatgtttattggatgaattgtataatgttgtaaatgtgaattgattcaagagacaggctgtttttcttttatataaaaatagttgtcgaattatgaaactgtataatgaaactgtataatagtacgtgtaagaagtcgtcgattttagtatggcaatgagctataaaagaacaacagcgctttcctgtggtgcaagtataatatcctgaccaatttctgtgtggttcatgttaaataaaaggagcttctttggttcggctgacagatgaagcgcttctttcttttcaccgaagtttccaagaacaagaatacgtttgtcgtctttttcgcggcagtaagccatcagcatctctttttccagaaatacaggaatagtttttccgtaggtaaaaatatctttgtatgtatcggatttacgcagtgcaatcagttttttatagtagtttaaaacagagtcggtgtctttctcctgggttgccacattgacatccgggtagttgtcatttaagtggagccatggtattcctgttgtaaaccctgcattggaagaagtgttccactgcattggggttctggcgttatcacggctgagtctgccgattttatctaaggcatctttttctgataaaccggctttcagagccagatgatattgatcaacggtattgagatcgtcaaattcatcaacactttgccaatttgtgttggtcatgccgatttcctgcccctggaaaataaacggcagaccgcgaagcagcagactcatagtgccgagcattttggtgccgcaggaattacgggcataaaccggaagatatcgagaaacaccccggggctcgtcatgattctcgataatattggattcgaaaccacagccataagcttgatcctgggcatgaaaaatagcttttttccatgcagggaaagcaacgtcaggggcatcataccaaccgtgttcaccggcggagagaagttccgtactgaagtcgaaaatagttgaaaaataaccattttctccgataaaatcagacagatcatcatcggtaatattaaaaacttcacccacagtaaaagcaccatgcttatcaaaggtttcacgttttaattcgccgagcatttcagagaccccgtcttttgtaccaagggttttggtacagaaagcaagaccgtccaggccgtccggctcaagcattggaaaatcaagattctttttgatattgataatagcatcaattcgaaagccggccagtcctttgtccagccaccagttgaccattttgtaaatctcctgtcgaacctttggattctcccagttgaggtcaggctgttctttggcaaacatatgaaggtaatatttgttagtgcccggaatcggttcccagatattgccgccgaaataagagcgggcattgttgatgggctgtccgtctttgctctcacggatataaaaataatcgccgtattcaccctccgggtcagtcatggcttttttaaaccattcgtgttcactggaacagtgattgacaaccagatccatcagcacatacatatttcttttcttcgtttctgcgatcagttcatcaaattcctccatagtaccgaactgctcaccaatggcataataatcagaaatatcatatccctgatcaacaaggggagagcggtagataggggaaagccacagaatatctataccaagttctttcagataatccagtttcgaaataatgccacgcagatcgccaatgccatcaccgttgctgtccataaagctcttcggataaatctgataagccaccttgtcgtgccaccattgcttcttcatatcaaaacctcctaaaggaaaataaaatcaaaattgcgtaaatattctatcatgaaatccgttacattggaagaaaacttgatcaaacaaatatattgctgtagatggaaaaattccaagccttcaaattgatactcagagtggaataaaattgccataaaaatatcgtgataggagtgacctattatgaatatagaaaaaatacaacacgtcaaaataattacgagatgtataactttctgaaaacgtttggcgatgagcctgtttgcagatagttatacaatctgtaatgactggacgtgttgtattttatcttttatgcgtcaagtttcttatgtaagtttttgttggctgttgccagcatcagtttgattcggttgacctggttgacttcactggcacccgggtcataatcaatggctacgatattggcttcaggatgctgatggcgcagttccttgataacacctttgccaacgatatggtttggcaggcagccgaatggctgtgtacaaacgatgttcggtgcaccgttgtggatcagttccatcatttcacctgtcaggaaccatccttcaccggtctgattgccgatggaaacaattggttctgcgtatttcgccagatcacgaatgttggcaggcgggtcaaagcgtttgctggcttttaattcatcgctggcggtcttgcggatggcttcaaggaaagcgataccggcattgccgagaatctgtcccttcttggattttccaagcttctcatacttaaaattcgagttgtaaaatgagtagagaaggaagtccagaagatcaggcatgacagcttcagcaccctcggattcgagaagatccacaagatagttgttggcagacggtgagaatttaacaaggatctcgcctacaataccgactcttggcttcttgatggtttcatccagcggaagattatcaaagtcatggataatacctttgacgttctgtttgaaactgtttttgcctttgccgatcatggaatccagacagatattcttccatttctcatggagcgcattggcagaacctggaaccttttcataaggacgtgtcgcataaagtacgcgcatgaaaagatcaccgtagacaatcgcctggagggcattctttaacattggcagtgtgtatttgaatccaggattcttctcgataccctgcgcactgatggagacaaccggaatctgtgacataccggcattgccaagggcacggcggataaatccaacatagttggttgcacggcagccgccgccggtctgggtcatggcgatagctacatgatttaagtcatatttgccggagagcagtgccttcataatctggccgacaacgcagatggatgggtagcaggcatcgttgttgacgtatttcaaaccggtattgatggcttctttatcgcagtcaggcagcagttcgcagttcagaccttcatggcgaagagccgggatcagcagatcgaaatgaatcggtgacatattcggaacaagaatggtgtagttgtctgcacgcatttcttttgtgaacagctgacgatgatgggcactgctttcaatatgaccgtggataccatgctgctcacgcagacggatagctgcaatcagagaacggatacggatacgggcagcaccgaggttgctgacttcatcaatcttcagacatgtatacaggcgtccggaaccgtttaagatatccttcacctgatctgttgtaactgcatccagaccgcagccgaaggagttcagctgaatcagttccagatcttcgtgttctttgacatattcagcggcacaatagagtctggaatgatacatccactgatcggaaacgatgagcggacggtccggtttggccagatgggagatggaatcctctgtcagcactgcaaagccataagaagtgatcagctcaggaataccatggttgatctctttatcaatatggtaaggacgtccggcaaggacaatacctttcatatggtgctgcttcatgtaagccagggtcatctcaccgtggcgctgaacagaagtgtggacaagttcaagctctttccaggacttctggacggcttctttgatctcacgagggtcaatactgaagcgtacagcaaactcttcaacaagacgttcttccagatgacgttcactttcaaaagtcatgaaaggattcataaacagaatggaaggatcagccagttcttcaacgttattcttgatattctcagcataagaagtaacaatcgggcagttgtagttgttggtggcaccttctgtttccttgcgctcataaggaatacatggatagaagatgaatttcacatcatgctgcagcagccacataatatgaccatgaacaagcttggccggatagcaggcggattcactcggaatggattcaataccaagattgtagatttcatgggtagattccggtgaaagcacaacagaaaatccgagctcagtaaagaaagtatgccagaacggatagttctcatacatattcagaactctcggaataccgacgatgcctcgtggggcagtggccttgtctaatggtttgtagttaaaaatacgattgtatttgtattcaaaaaggttcggcacgtcgctgtttgtcttagcacgaccgaggccgacttcacatctgttgccggagatatagcgtctgttgccggtgaatttgttcactgtcagacggcaatgattggtgcatccgccgcagcgagtcatactcgttgtgtatttcaggttgatgatgtcatcaagagagagcattgttgttgcttcgcctgtataacggtcacgggcaatcagggcagcaccaaaagcacccatgatgccggcgatgttcggacgaacagccttgcagccggaaatcagttcaaagcttctcagtacggcatcattgtagaaggtaccgccctgtacaacgactttcttacccagatccttcgggtctgtaagtttgataaccttcagcagcgcattcttgataacggaataagccagtccggcggagatatcgccgacttcggccccttccttctgagcctgtttgacattggaattcatgaaaacagtacatctggaaccaaggtcaatcggatgtttggcaaaaatggcaatctttgcaaagtcttccacagaataattcagagaatgggcgaatgtttcgatgaaagagccgcatcctgaggaacatgcttcgttcagaagcacattatcaacggttttattgcgaatcttgatacacttcatatcctgtccgccgatgtcgaggatacaatccacgtccggttcaaagaaagcggcagcatagtaatgagccactgtctcaacttcgccttcatccagcataaatgcagacttcatcagtgcttcgccgtaacctgttgagcatgaacgaacgatttcgacatctgcagggagaatattcttaatctcctggatggaacggattgctgtctttaatgggctgccattgttgttgctgtagaaggaatagagcagggtgccgtcttcgccgacaacagcaacctttgttgttgtggaaccggcatcgatgccaaggaaacatttgccgtggtaatcagcaagattgccttctgttacagtatgtacggaatgccattttttaaaggcatcgtattcttcctgattcttaaagagcggatccatacgggcggtctctgcctgaatcttgatatcggaagagagcagacgaatcagctcgtcaatggaagtggtcacatcagccttgtagttcatagcggcacccatagctgcaaacaaatgggaattggccggtgcaatgacttcttcgtctgtcaggtgaagtgtgcggataaaagctgccttcagctctgaaaggaagtggagcggaccgccaagaaatgccacatgaccgcggatcggtttaccgcaggccagaccgctgatggtctgattgacaacggcctggaaaatggaagcagataagtcttccttggaagcgccgtcattgatcagaggctggatatctgtcttggcaaaaacgccgcacctggcggcaatctgataaatcgctttgtaattcttcgcatattcatttaatccaggggcatctgtctcaagaagactggccatctggtcgataaaagaacctgtaccgccggcacagataccgttcatacgttgttccacattgccgttttcaaaataaatgatctttgcatcttcaccgccaagctcaatggcaacatctgtcttcggcgcaaaatagccaagggcactggaaacggagataacttcctgaacaaaaggaacatgaatatatttggagatggacataccgccggaaccggtgatcatcggatgaagatcgcggtctccaagttccgcacgggcttttgtcatcagatcgagcagtgtctctctgatattggcaaaatgtctttcgtaatcggaaaaaaggacgttgttgtctgaatccaaaatggctaccttgacggtagtggagccgacatcaatacctaaaaataaagttgcatccataaataaaagctgattccgaaaggggaatcactaccctccttatgtaaatatatgaatagacaaaatagtctatataaaataggaaactatgaattgcgtgatagcaagtccatcttattatacgacatgatgttgtaaaaaacaaccgtcaacttttttgaaaaccattaaaaaaaggtaaacatttctataaaaaagaagaaaattctctttgcacattttaaaaatgagccgcatagattataataaaaaggcagggattaatgaccatgaattattatgtcagcggtgagaatgttaatggacgcccctgcagaggcgttgttcatgtggttaaaaagggagataccctatacaaaataagtcgtgtttatgatgtgaaagttgcggatctgatttggatgaatccgggggtgcgtatctataatcttcaggtgggtgacaaaatctgtgtcccggtgagcagttgggagatgccggatgcagatcatgacaatgctgagacattgccgtatattgtccgggcaggagagacactggatgcaatccttcagaccttcagattgacttatgaagaacttcagaagctcaatgaggacatttctccggcctatgccgaaggaactgtattgaatattccttcgaatcggattcttcgtcggagacaggaagcacagtagtagtggcagcagcggatgcatattgtccatccgctgctgtgcagttgtatattttacgccgtattgattgacaaaaattcatggaaaatctataattacagcatagcttataagaataaacgtaaaggagagaatctattggagaaatttttaaataaaatggagagaaaattcggccgctatgcgatttccggtctgatgaaatacatctgcgttttatacattatcggtttatttatcaacattgcatcaccacaggtttactattattatctgagcttgaatccctatcggatcctgcacggtgaagtatggcgacttgtgacatttctgatccagtcaccgaattcgaatgtgatcttttttatttttactttgtatctttattatatgcttggacagacactggagcgcgtttggggggcgtttagatttaacctgtattattttgcaggtgttttatttaccattatcggttcttttgccgcctatttcatgactggacaggtttatctcatggatacctattatattaatatgtctctgttcctggcctttgcgtttgtttttccagatatggagatgcttttgatgtttttgatcccgatcaagatcaagtggttggcttatctggacattgcattgtttgtgtatgagatggtcgtcggcaacatcgggacgaagatttctattgccatggcacttctcaattttgtaatctttttctttggcttcatgagaaagagagtttcaccggcccagatgcatagacgggcggcttacaagaaggcggtgaagaagatgccgagcagacatcgctgcgcggtatgcggaagaacggaggagacgaatccggagctggaattccgcttctgttccaagtgcaacggcaactatgaatattgtcaggaccacctttttacccatacccatgttcagtagagggggatgcccttcagctataaaagataagcggttgtgtttaattatgataaaagtggaaagactatcaatgattagcaggagttaatgatgcgctggtataacaaaatgtatttgggaaaatccattcagggaaagaaaatgtattatcagtatgcgattcagcatacaaaacggctgacaggcacctattgtctgatgccggctgcctgtaaggatgatctgatagatatatgtggcagcgacctgcttcgtgtatcgaagcagtatccgaaggatcagctggttatcggacttgccggcagttacagggaggcctgtctgctggcgggagagattgtgcttgatgttctgaagaagacaggaagcacagatatcagggcatatttaagagattccggagagaatatctgatcgagttcgactggaagaaacaactgaagcggtcgattggataataaagtgaataaagaatctcagtatgaaaaaggggtgtagaagtgctgttattacatatactgcttttccttctgaaactgatcggcattgtactgcttgtcattcttggtctgattgtgctgatattggccatcatccttttgacaccgattcgatatcgaatcggtgcttcgaagtatcagacaatacaggcggaaggaaaggttatgtggctctttcgtctgattgagatggtctttaagctggatacaggtgctgaagaaggaaagcgtcttcatctgagtttcaggattgcgtggctgaagctgtatgacaatcagaaaccaaaggaaaaacgtataaaacagaaaaaaacaagaaaaactaaatcaaaggcggaatctaagcagtcgaaaaaggtaattcaggcagcaaagcctgaacagccggaggcaaaggtacagccaataaaaactgaacaggcggctgaaatgaagcatgaagagaagctgattgaaggaccgaaggaatctgcggtggagaaaatccttcgtctggctaagaacgtagccaataagatcttgtcgttgatccggggcgttttctctctgatctgcagcattttgggcattccgtcaaaaatcatggatggacttgaaaagcttgagaatttctttacaaaactccgtgagaagaaagaagcgtttcttgcattttataatgagacacataaccatcaatggtttactgctttctggcatcggctgaagaaactactacttagaatattaccgagggcagacagattgtatctgcattttggctttgaagatccggcgacaaccggtcaggttcttggcggtttaagtattctttatccgatctttggcgagaagatggagctgtgcccggagtttaatgaagaaatactggaaggtgaagtaaaatgtcatggtcggatccggccggtcagtttagttatatttgcggttaaaagctttttaaacaaacaatttttttcaatggtgaagcaatttaaagtcctgttaaagggcgaataagaggatggaggaattggatatgtcagatcacacatttaatgaaacagttgaatctctctttaaaggaatggacaattttttgacaacaaaaactgttgttggtgaggccattcatgtcaacgatacattgattctgcctctggtggatgtttcatttggcgtcggtgcaggtgcatggagccaggaacataaaaacagtgcaggcggcggtatgggcggtaagatgacgccaagtgcggtgcttgtcatcaaagacggttctgttcgtatggtaccggtcaacaacaatgatcctgtcagcaagattattgatatggcaccggatgtgattcatcgttttatgaacaagtcagaagatgatgcagctgtggaatcagcggttgaacacatttcagaagaagagtaacgagtaaggccgacagagcgtgctttatcttgtttgacagaagaacagaatcggttaaaaagcatagaataaaacaggagtattctgtaatggggagtgccatgaaaaagatgtgtggttttgtcctgttctggatagctgcaggcatgaccattatgatgtttgtcaattcctgtgtattaggcatctgcctgattatattttgtcttattttggcttataatctgttctgttcaaaataaaaacggaaggcgacaagaaaaatgagtcagttaatgcaattacagattgaaaatgaaaggacttttttaacatataaatataaaaaagtgcaggatattgatgatgtgatcctgcagctgctgaatgaggctgatattgagggctttgcggaaagccatatgaataaagcaaaatctaccgtgaattatgatgtgaccggatacaggaaatggtcagaattctcatcggacgaattgacgccggaggtgatggcctctgcaatggagaatctttatcatcttcttgcttatctggaggattcgtttattgatattgaatatgtactgctggataaggaatacatttatgtcaatccgggcaatggcaaattagtgattctggttgtgccgtgtcaggcagttgtagatgaagaatatacattgacggattgcgtcagacagatgtttgaacagtttacatatggtgaaggagcgtgtgcaaagcagttgaaatcctgtcttcagcaggaaatacatgcattggaaacactgaaagagctggctgatcttctgcgtgcatatgatgctgaaccgaaagaacctggagaaactgtttctgatgaaccggcagtgccggaggagaccgttattctggagacaattgaggaggaagcggatcagattaaaacagaaagtgccaatattgcggcagatgcagagtacatgcgcaaccagcttcgggaagatatgcgccgtgaactggagaaagaactgcgggagcagatccgtgaagaaacacgcagggagttggaaacagaattaagagaaagtatccgggcagaacttgaagaagaacaggcacaggcagaaacatcggatgagaagatgccgtatctgattagaaagaagacaggcgagatcatcagtctgaataaacagacatttattatcggcaagctggatacctgctgtgattacgtgatcaggggcaatcgggccatcagccgtctgcatgcagtgatcaagtacaaagaggatacagatgtttattttatcgtggactgcaattcgactaatcatatttatctgaatggacggcagattgaggcggagcagccggaaacacttgaagatggcatgcatattcatctggcgctggaagagtttgtttttcaactgaaatagtgaatcggagctgcgaaacgtcatatttgctgcagaatctaaaaatgaccatttcaaacggatgcgtgtttgtattggtcatttttaggttatttgactataaagatgaaaaaaagccctgtttcgtaagaaacagggctttaagtttgcatattaagctctttcaactaatcctgaacgtaagcaggaagtacaaacgtacatcttagatggtgtaccgttcacgttcactttcactttcttaatgttggatttccacattttatttgatcttctatgtgaatgagacacctgaataccaaagtgagctcctttttcacagattgcacattttgccattgtaaaacacctcctcgtgccaaattaaaccttaaatgagacgcacaaaaacgccttacaggcttacaacaaatcaataataacagattcgaccgataattgcaagtacagattttataaaatataaaaaaattattttcttttcgggaaaaagcggttataataggtgagtagaacatagaaataatattggaggtaccatatgaagggacgtattattacagatataggtcaggtttccgttgatacagatgttattgcaaagtatgcaggtatggcagctgttgagtgctttggtgttgtcggtatggcaatgatcagtgtgaaggacggactggttaagcttctcaaacgtgagagcatgacaaagggtgtcggtgttacggtcaatgaagataatcagattacaatcgatttccatattattacagtatacggcataaatatcgcaacgattgcagataatttaatgaataatgtaaaatacaaagtggaagcgttcacaggcatgaaggttgagaagatcaacatttatgttgaaggcgtacgagtgattgactagtataacaattaaggaggaccctgttgtgggagtaaagacgattgacgcgaatatgttgaagaacatgttccttgcaggtgcgaaacgcatagaatcaaagaaagaatggattaatgaactgaatgttttccctgttcccgatggagatacaggtacgaatatgacgatgacgatcatgtcagctgcccgtgaagtaagtgcgctgacagatcctgatatggagagcctgtccaaggcaatttcccagggagcgttaagaggcgccagaggcaattccggtgttattctgtcccagttattccgtggttttacacgcccgatcaaagacgagaaagttatcgatagtgtgatcgcagcagaagcatttaagaaggcaagcgagactgcttataaggctgttatgaagccgaaggaaggtacaattcttacagttgcaagaggcatggcagagaaagcagcggatatttttgatgcaacagatgatttggaagaaggttttcgtcagatcatagagtatggtgattacatgctgagtctgacaccggagatgctgccggtattgaagcaggcaggtgttgtggattccggtggtcagggtctgatgactgtactgaagggcgcatatgactgcctgacaggtgctgagacagcggatgattttgtagcagaggtaaaaccttctgcaccagcaggcaatgcgggcaagatgggactggatgagattgaaacagccaatatccgttttggttattgcacggaatttatcgtgatgcttgagaagcctttcgatgagaaggacgaagacgaatttaaggcatttttggcatccattggtgactccattgtatgtgtagcggacagtgatattgtgaaggtacacgtacataccaatgacccgggacttgccattcagaagggcttaagctatggctccctgacaagcatgaagattgataacatgcgtgaagaacatcatgaacgcctgttcaaggatgcacagaagctggcatctgcccaagctcaggcggatatgcaggtgaaggcagagaagaaggaagaaccggccaaggaggcggggtttgtagccgtttccatgggtgatggtatgaagaaaattttccaggagcttggtgtggatgagattatcgaaggcggacagaccatgaatccgagtacagcggatattctggatgctgttgagcgtgtgaatgcgaagactgtttttgtgttccctaataataaaaacattattcttgcagcacagcaggcaaaagatctggttgaaggcaagacagtcattgtgatcccttccaaaacagttcctcagggtattacagctgtgattaattacatcaacggcagttcagcagaagaaaatgaagcagcaatgaatgaagagatgcagcgtgtcaagagcggtcagattacttatgcagtcagagatacggttattgatgacaagactatcaaagaaggcaacattatgggccttggtgatgatggccttctggcagtaggtgaagatattgcagagacaacgatggcaacaattgcagcgctggtcgatgaagacagtgagattatcagtatttattatggtgaagatgtgtctgaggaagaggcagaagaactgacagagaagcttgaggaggcttatccggattgcgaagtcgaactgaatcagggtggacagccaatttattattacgttgtttctgttgaataaaagcgatgcttcattagattataattcacgatgaaacagcctgagtgactgctgcagcgagaactgcagcagtcatttgtgctatatggatatgaaggattgcaagagtgcaaagcacgtagcaatttggtatcaaaggggttaaaataccttttgacgccaacatcatatgaatgagaacggagaggatgagaacagatgaatcccggggacagaatttcaacaatcaaagggatcggtgcaaaaacagaaagtcatctggcgcgcatcggcatttatacagtgggggatatggcagagcattacccaagagaatatcatgcctatgacacaccggtttctatagagaatacagaatatgacaatcgcagacagagcgggtaccgggtgattttttctgaaactccgaaattgctgaaacgcggcagaacacctattgtatcggtgatgctgcatgcaggcaatgcttctgtgcaggtggtctggtatcacagcccttatgtacggcagcagctgaaaccgggatgtacagttattctctatggaaagattacaagtaaaggaagccgcagaatgctggatcatccggatatttatacagaagatcagtatgcgctgctgcaaaaaagtcttcagccggtgtatggcctgacggaaggactgacccagaatttctttatgaagacaatgcatagtattctggacagcggtctgctgctgccggatcctctgccagcggatattcgcagacagtatcagctttcagaatacaattatgccttgagacagattcattttccagaaaatgaagaggcatgtcggatggcgagaaaaagactggtttttgatgaatttcttgtttttgcattgtcggtgaagcagttgaaaaaagaaaatcatcagatagagaatcattatcagattcaggaatcggcggcagtttctcagttgatcgcatcattgccgtatcatctgacaaaggcgcagctgagggtctggcatgaaatcgaagaagatatgaagagcccggtcgttatgaaccggcttgttcagggagatgtgggctcagggaagacgatgatcgcagcattggcgatgtttgcggcagcgaaggcaggatttcagagctgtatgatggcaccgacggaagtgcttgccagacagcactatgagaacctgcaggcattgtatgcaccatttggtatagaaacggttctgctgaccggatctatgacggcggctgccaaaaggaagacgtacagccggattgaaaatcatggagcagacgtcatcatcggtactcagacactctttcaggaaaaggctgtatatgataagctggcattgattgtgacagatgaacagcaccgctttggcgtcagacagcgggaacagctggcgatgaagagcaatggtggggaaccgcatgtgttggttatgagcgcaacgccgatcccgagaacattggcgatcattctttacagcgatttggatatttcagtggtggatgagaagccggcgaacagactgccaatcaaaaactgtgtggtaggcacttcctaccggccgacagcctatcgatttcttgagcagcagatcagacagggacatcaggtttacgtggtctgtccgatggttgaagagagcgagaatattgaggcggaaaatgtccaggaatatactgaaaaattgaaaaaagttttgccggcagatataaaagtggaatatcttcacggtcagatgaaaccggagcagaagaatggtattatggaacgtttttctgaaggtgagatacaggttcttgtatccacaacggtcattgaagtaggggtggatgtgccgaatgccacggtgatgatgatcgagaatgccgagcggtttggattggcgcagctgcatcagctgcgtgggcgtgtcggaagaggggatgcacagtcatactgtatttttatttatggtcaggagaacaaaaaagtcaaagaccggctgaatattatgcttggtactaatgatggatttaagatcgcctcagaggatctgaagctgcgcggacccggagatatgttcggtatccggcagagcggcagtatgatttttaagatcggtgatgtatttgcggattcagcctgcctggtggaggctggtaaagcagcggatcacatcttatcagaagatccggaattgaaaagcgaaaagtatgcgtttctgggaagcagaatcacagcaaagttatcagaaaacagagagcaggttatcttataaataaagagttgcaatgctaaaaaaaacatgaaatatttgataaccggttgacaaatgggtcaaaaaatatacaatataactagcgcaatattttcatcaataagggtgctgggcttaatggacagcattcaggatgaaggcgtaatgaaagaacaggatgtgatgacatgcgagtgattgcaggtaaggcaaggcgtatacaattgaagagtatggaaggaatgaatactcgtccgacaaccgacagaatcaaagagaccttgtttaatatgctgtcgcaggatatttacggatgtcatttccttgatctgttcagtggaagcggagccatcggtattgaagcgttgagccggggggcggcatctgcggtttttgtggaacataaccggcaggctgtggcatgtattaaggagaatctgacgaagacgaaactgatgtctcaggcggagattatgcctgttgaatgtcagacagctattcgacagctggatgacgggaagcgacattttgacatcgtttttatggatccgccttacaataaacagcttgagaaagagatgttgatacagatgcagcatgcgtcttttattaatgaagagacgatgatcattatagaagcatctcttgagactgaatttgattggctggaaacatatggttatatcgctgcaaaagtaaaaaaatataagacgaaccagcatgtgttcgtacagagggtattggagaaataaaatgagaacagcaatttatccgggcagttttgatccggtcacatatggacatattgatattattaagagatctgcaaagatggtcgataaacttattatcggcgttttaagcaacagctcaaaaacaccgttgttttctgttgaagaacgtgttaatatgttaaaggaagtgacgaaagatataccgaatgtcgaagtaacatcctttgcagggctgctgatcgattttgcggatgcctgtaatgcgaagattattgtcagagggctgagagcagtaactgattttgaatatgaattgcagtgggcacaggccaacagagccgttcgcccacatctggatactttgtttttggtaactaatgttgaatattcctatctgagctccagcgcagtgcgtgaactggcgagatatcatggtgatgtcagcctttttgttccgccgtacgttgagcagaagttagatgaaaagttagattcgaaggagaatgaacatgagcagaattgagcaattgattgatgaaatagaagaatatgtagaaggatgtaagccggcacctttttcacaatcaaagattattgtacagaaagagcagctgtatgaattactcacagaactgcgcctgaagacaccggatgagattaaacgttatcagaagattattgcacagaaggataagattatcagcgatgctcaggctcaggcagaacagatgattgaagagacaaccaattatgccaatgcacttgtagaagagcatgagattatgctgaaggcctatgagaaggctgaacagaccatcaatgcggcaaatgcacaggcagaagagattgttgctgctgcgaaccagaatgcagaagaaatgcgtatgagtgcgctgtcttatacacagagcctgatcgtcaatatccaggatgttgtacagcgttcactggatattgcgaagacgaattcagagggactgatcaacggactttcagagaacctgaatattcttgtcagcaataatgaagcgcttgtttcacagctgaacgataaacagcctgcagctgctgaagaacttcctgcaattgatgatgaggaagatacagtcgctgatatgacaggtcatgatgaggctgctgaggaagaggatgacaagactgaggaccagaaacagcctgtgtctgaagaaacgaaggaagaagtcatcgaagaagaggatgaagaagaaatcgacgatgatgaatatgatgatgacgattacgatgacatcgattaatccgtatcatcagacaatctgatacagaatccatacaagcgctgcggtgatcatgccgacagcgcttttgtctgccagatattgaacgcaggacagcttttgtgtgcgaagaagtgcaaaagactggaaagcgatgcataatccgccgaaggctgtgccacccatgatcaggctcgttttcaggcaaagctgaagcggaagaagacggacagcggcagaaccactggtgatctcaaggaaaagagcgagaacagcgctgagggatgcaggaacaaaaggaagacttccgatgattgcctgcaaaatagagaatatcatcatgcagacgccgattttcagcatcagttcagaagcattcaaaagaatggttctgaagggcaaaggtgcagaaggacgagtggattttgcaacggcccggtcccgtactgaggcaggtgggtgatgcagaaaaaagcagcgcagcagaaaccagagaaacgggctcgcataaaagatcaggatcagacaggaatgcagcggatgatccggcaatatctgatcaagaatatagccgccaaaaaacatggggctggcatgattgcagaccccggacagcagctgcgcttccttgcgggagatcagcccgttttcaagtgcctggacagatacggctgttcccattggaaaaccgcataaaaatcctgcaagaatgcagaaactgcatgccggtgataagtgcaggcatttttgcataatgggcgctgtcagacagctgatgccggacagtgcattgacagacatgatcagctgcagaatcagtgcaaagggaaaaagaacgggcaatacctgattaaaccacagtacaagacctgctgaggcaccgcggacagcctgcggtgcgtatatgatcagaacggcaggaagaagtaatagcagaatagatgtcagatgttttttcatagaatcccctcctggctatatatatgcaggagggaataaggttatggcaggatgatgacaggttctgaggtgatatcaggaagaaatgactgtgagcggcatttcagaatctggcgatagagtcgtgatgcgtgaaggtccgcgttgtagatgtccaaaccgatccctgtcagatggtcataggcctgggatgtctgagtgatcagctgcgctctgaccgatggctgaaagaatttccagatcgctccggactgttttctgaagccgagaatacgcagaaaaccggcatattgatgatttctccatgtatccagataattgcgcctgtggtccagaatgatatggaagagacaccgggcaatccgggtagaagtcagattcctggcagaaagaagtgttataaactgttctgttgataaaaactgatatctgaaactgtcaatccggttggccagatcactgctgatatcgacatattctgtcaagtcggtatggacgtcaaggagttgtgcggccagaacgtccgaaaagtcgtttgaagtcagaatcggtcggtgggtaaggtaagactgcaataatactttggatgtatccggaatatccagtccggcaatgcattcggatgggttcaaagtgccatcagacagttgatgtctgatggcagtggcggattgaaagccggcagttgtctccatactgtggtaaccggcaccggtgcgcctgattgcaatcggcttgatcgggctgcccgttttgcacagagccttcatatattcaatggcaagaatattgttgggcagatttagaatatggctgcaatgcgtattcttcagcaggcgtccaagggcgtaacttctggctgcaggaaaattcatgccagtcttcagtgcgtcctgcaaaagtgtccggtattccggtggttcatcggacagcacagaaacaatggcatgaaacagatgagggtcaatcgtttcagcaccaaagcagagaaaatcaatgcagcccagctgattcagcagagaaacagcggattcggcaaagatttccgcactgcccagggcaccgtaaaccgggagttcacagaccatatctgcaccggcggccagggccatacggcatcgggtgtatttgtctgtacaggccggggcaccacgctgaacaaagtcaccactcatcatgacaagaatcagatcggcgccggtttgcctgcggatttctctgagctgataggcgtgcccgttatgaaaaggattatattcggcaataactgctgcaatagtcataaaaatctccagtctttctttttttatataaatgtaactgttcagagctaacctccaaaatgctacgcatttcgtcggtgtggcgtatccgccaaataaaatttcaaaaacannnnnnnnnngtacatataaatattataagggctttggtggaaaaaacaagccaaaaaagtatttatggccggagttatccaagctgtcaagtaataatacttgacagaaattcaaatttactgttgacaaataatgcattcatatgtataattacaaaggtatgaaacttaggagatatctatgcaaatcaatatatctgaaataatatcaactgattataaggtacaaacgtttaatcctgagattgaaatggaagtattttgtctggatggtgagcgttataattttatccggaagagtccggtggagctgaaggctcagaatgagggccacagtgttgtgaatttttccggccatgtggatgttacaatcgatataccgtgcagcagatgtctgacatctgttccgacaagactggcatttgatttcagtcagaaggtggactttgagaagctgaaagcggagcagttggacgacctggatgaaaccagttttatggaagaaagctctctggatgtagacagattcgtttacaacgagattttaatgcgttttccgatgaagacactttgcagagaagactgtaagggcttatgtctgaaatgcgggaagaacttaaatgagggtgagtgcggctgtgaccgtgcatcattagacccaagaatgtcagctatccgggatatttttaataattttaaggaggtgtaaaccatgtctatttgtccaaagaataaatcatcaaaagctagaagagacagccgtagagctaactggaagatgtctgttccttcattatccaaatgcagcaaatgtggtgctttagtaatgcctcacagagtctgcaaggcttgcggagcttacaataaaaaagaagttgttaaggttcagtaataataaactgcaaccatcagaaaagagactcttcggagtcttttttttgtaccatttcatacgacggaaaggttgtctgataaaaaaagctgtattttctgaaaaattatggtactatattaaggtgcataatggtaagcgtgcagttagaatgagacatatgtattgtgcgcatatgtgtatgatgaaggaggacaaaatcatgcgtagatcaatcagacgttatttgagtatgctgcttgtcatgctgatgacagtatcagctgcagcagtcatctgtacaaagaatgcttatgccggaagtttttccggcggttatatatcgcttggtgccgatctgacagaggaagagaagtcaaaggttctggaactctttggtgtggatgagaaggatttggagaattataaagtcgtgtatgtgactaataaagaagaacatcagtacctggacagctatatttcaagcgcacagatcggtgatcaggcctggtcttcggtattgattacggaaggcaaaaagggcagcggcatcaatgtgacaacgaagaatgttatttattgtacaaccggtatgtatgccaatgcgctggcgacagccggtgtggaagatgtgaatgtagttgtggccggtccatttaatgtatccggtacggcagcattggtgggagcactgaaagcttattcagagatgacaggtgagactgtggatgaaaaggttgtggatgcggccgtggatgagatggtgaccacaggcagtctggaagataataccaatgctgacaacgagaaggtggaaggaatggtagcctatctgaaagaacaggttgcaagcggcaacagcaaggataaggatctggatcagatcatcaatgatgcggcggataagtttgagatcacattgaatgaagatcagtttaaccagttaaaagcacttcttgagaagctgggcggcctgaatctggatctgggatcattgaagagtcaggcacaggcggcttatgatacattgaaggatatgggttttgatatcagcaagatccatatcgatacagaagaagcaaaaggtattttccagcagatcattgatatgatcaagggttggtttaattaggacaggaaggaaatagactatgagtgaattggtaagagtggccgtggatgccatgggcggcgatcatgcgccggaagctgttgtgcagggcgttgttgatgcattaaatgcgagcaaagaaatcgaggtattactggtgggtgatcagacggctattgagaagtgtctcaccggtgcgcaatatgataaaacacgtcttcaggtgatccatgcatcagaagtgatcaccaataatgagacgccgaccatcgccatcaagaagaagaaggattcttccattgttgtttcacagagactggtgcgtgaaggcaaagcggatgcttttgtctcagcaggcagtaccggagctgttctggtgggcagccaggtgctgatcggacgtatcagaggtattgagcgtccggcgcttgcaccgttgattccgacaaccaaaggcttttcgctcttgatcgactgcggtgccaatgtggatgccaagccttccaatcttgtgcagtttgcaagaatgggtgccatttatatggaacatatcttgggccgcaagaatccccgggtagccattgtgaatattggtattgaggaggaaaagggcaatgcactggtgaaacagacgtatcctcttctgaaagaatgcggggatattaattttatcggcagtattgaggcccgtgatataccaaacggttatgcagatgttattgtctgtgaagcttttgtaggcaatgtgattttgaagatgtatgaaggcgtggccggtgcactgatgggcatggtcaaggagaccatgatgtcttcactgaaaacaaagatcggggcgcttcttattaagaatgaactgaagcagacattgaaagactttgatgcttctgattacggcggtgcaccgatgctgggactgaagggactggttgttaagagtcatggcagttccaatgccaaagagttcaagcaatctattctgcagtgtatcgcattcaaacagcagaatatttcaggcaggattgcagcgtctattacagcggacaaggaattactttcagcttcagaaaacaagacggaagaatgatacaatagttgatttaacaggaagagggagaagaatggcaaatcatacattattaaaagaactgcagcagaaaattgattatcagtttaaggatgagaatctgttgtttacggcactgacacatagttcttatgccaatgaacacaaattgcataagattcatcataatgaacgtctggaatttcttggggatgcggtacttgaagttgtatccagtgatttcctgtttaagaattttcctgatatggcagaaggtcagatgagcaagaagcgggcaagccttgtttgtgagcctacattggcttactgtgcaagacagatcgggcttggcaaatatctgatgctgggaaaaggtgaggatatgggcggcggccgcaacagagattctatcctgtcagatgcattggaggctgtcatcggttctatttatctggacggcggtattgaacaagccggcagctttattatgacccatgttttgaatgatattgaacataaagccatgttccaggacagcaaaacaattttgcaggaactccttcagaaggaccacaaagatccgatcacctatgaagtggtggatatgacaggacctgagcataacagaatgtttgtgatgcaggtgaagctgggagatagagtgattggcaaaggcagcggcagaacgaagcaggcagccggtcaggaggctgcttatcatgcaatcctggcattaaagaacaagcaggaacattaggggacagtgtatgtttttaaaaagtattgaggtacagggctttaaatcctttgccaacaagatggtttttgaatttcataaaggcattacgggcattgtagggcctaacggcagcggaaagagtaatgtagcggatgcagttcgctgggtactgggtgagcagagtgccaaacagctgagaggatccaagatggaagatgttattttttccggtactgagagcaggaaacctctgggttttgcctacgtggcgatcactctggataattcagaccatcagctggcagtggaatatgataccgtgacggtatcaaggcgtgtgtaccgttcaggagaaagtgaatacaagatcaatggccataactgcagattgaaggatgtgcaggaactgttctttgatacaggtatcggtaaggaaggctattcgattatcgggcagggtcagattgacaagatcctcagcggtaaaccggaagaacgaagagaattatttgatgaggcagccgggattgtcaagtacaaacgtcgaaaagccctgacggagaagaatctggcggaagaacagcagaatctcagcagagtgcgggatattttgtacgagcttgagaaacaggtaggaccgcttgagaaacagagcgagactgcaagaatttatctgaagcacagagatacactgaagcaatatgatgccaatatgtatctgttgtctttttaccaactgaaaaaagatagtgctgccatcgatgagaaaatgaatattgtcagtacacagctgaaggattcccaggagaattttgagaagatcaaaagtgcgtatgcccagatggaagcgctgatggagcagtacgatcagaagatttcacaagatcaggaggtctgcaatcagcaggctttagagaaacagcgtcttgaaggcggcaaaaatgtactggtttctaagacagacggcatcagcagcaaggaagaacagtttgatgcattgatccttgagacagaggcgggaatcgaagagaagaagaaactttccgaggaaagtgagaaagaactgaaagccctggaagaggaactgcaggaactggagcagcataagaacagctctgaagaagcattgaacagtatgtccggtacgatgacatcattgcgagatcagattgattcacagaacagtgatattattgaatttctgaatgaggcggcgaatattaaaggacgtatgcagcgttatgagacaatgcaggaacagacacagatcagacagtctgaattgaatcagaaactgatcgcacttcaaagtgaagaatcttcagaaggtgagctggtagaggcatttaagaaggaagcacagggcattgaactggagcttgagaggctgcaggcagaacagtccgcctgcaaaaagagagctgccaaaatttccgatgatctgatgaaatgcagagaggctttcaatgcggctgagaaatctttccatgaagagtcagcacgttatcagacactgaagaatatcacggagcgctatgacggttacggtgtcagcattcgtaagatcatggagcgtaagagtgactataaaggtatcattggcgttgtggcggatattatccatgtcagcaaagaatatgaaattgccatagagacagcccttggcggcagtatttccaatattgttacggataatgaacagacggcaaagagtatgatacagtttttgaagaagaatcgttttggccgtgcaaccttcctgcctttgacgagcatcagggggcgcagggcagagaatgcggacagaatctgtggtgaggaaggcgttattggtctggccagcgatctgatccgtgtggacagtcagttcggacatctggcggattacctccttggccgggtgtttattgtggatcatattgatcatgcgttggctttggccaagaaatatcgttattctttaagaattgtgactttggaaggcgagtccttaaatccgggtggttcattatccggtggtgcctataagaatacaggcaaccttcttggcaggcatcgtgaaatggaagaattgcagaaacatgtggagacacttcgcaaagagggcgcctcgctgaaacagcagatcaatcagctgcagtcagacaaagacagtaataaagcagccatggagaaaaatacagctgaagaatcccggcttacactccatcaaaatacggtgcgtctgcgtctgaaacaggttgatgagagccgtggagagcatgcaaaatccattcaggatattaatcgggagacggcccagatcaaaacgcagcaggaacagatcaggcagttcaggcagcagctgacggttcagatggatgaactggaggcaaagaagaagaatgctgaggaactggtgacatcattgacggccaaactggaagaaatctccgaacaggagaagaatttcaacagtcagacagcagatatgcggattcattatgccaaccaggtacagaagaaatctttcattcgaaagagtatggatcaaaaccgcagcgaaatccgtcatttacaggaaaaactggcagattaccgtgcccagaaggctgttttcggaagtgagaaggatgcaatacgaagacagattgatgaaacagaggcccagattgctgctttgacagaagaaatgacaaaaagccaggcagtgcttcgccagaaaacagatgaacgcagtaaatatgcagctgagcataaaacattttttgcaaaacgtgaagaattgtctgagacgatcagtcagctggacaaagaacagttcagacttggcagtcagaaagaaaagctggaagagagccgcagccaactcagcagttatatgtgggaagagtatggcctgacttatcagacagccagggaattatcagatgatgcgctgcaggcactgccgttggcgaaactgaaaaaaatgacagcagatgttaaaggacagatcaaagccctgggcaatgtcaatgtcaatgccattgaagaatataaggcagtggccgagcgctatgagacgatgaagactcagcatgatgatatggtggaagcggaagagaagcttgccggcattattgaagatctgaacagttccatgcagaagcaattcaaggagaagttcatgcagatccagaaagaatttgaccgtatattcaaacttcttttcggcggcggaaaaggtacgctggaactggcggatccggaaaatctgctggagacaggtgttattattacagcgcagccgcctggtaagaaactgcagaatatgatgcagctgtccggcggtgaaaaagcattgacagcgatcgcattgctttttgctattcaaagtctgaaaccttcaccgttctgtcttctggatgagatcgaagcggcgctggatgatgccaatgttaagcgttttgcagaatatctgcataatctgacaaaggatacgcagttcattgttattacgcatagacgaggaacgatgaatacagcggatattctttacggtatcaccatgcaggagaagggtgtttcaacacttgtatccgtgaatctgatagaaaatgaattaggaaaataggaggtaatttatgtctgaagaaaagaaaggctttttttcacgtcttgtggagggtctgacaaaaacaagaaataatatcatgtccggctttgatgcgatcttttccggattttccaatattgatgaagatttttatgaagaattggaagaagtgcttgttatggcagatctgggtattcatacaacggagaatattattgaggaattgaagcggaaggttaaagaacagcatatcaaggaaccacaggcatgcaagcagctgctggcagatacgatcaaagaacagatgcgtgtcgatgaggaagcttatcagtttgagcatcagacatccgtggtactggtcatcggtgtcaatggcgtcggcaagacaacaaccatcggcaaacttgcgggacagtacaaaaaggcaggcaagaaagttgttcttgctgcagcagatacattcagagcagcggccattgaacagctgacagaatgggcccatagagcaggtgttgatatcattgccggccaggagggttctgatcctgcatcggttatttatgatgccattgcggcagcaaaagccagaaaagcggacattcttctgtgcgatacagcaggtcgtcttcataataagaagaatctgatggaagagctgaagaaaatcaaccgtattatcgaacgggaatatccggaagcttatcgtgagaatctgatcgtgctggatggtacaaccggtcagaatgcccttgttcaggcaaaacagtttaaggaaacagcagatattacaggtattgtgctgacaaaactggacggtactgcaaagggcggcattgccattgccattcaggcagaacttggtgtgccggtgaaatatatcggaatcggcgaaaaaatcgaagatctccagaaattcgacacggacgcctttgttgacgctctcttcacaccggcagaagaaaattaagttaaagacgggcgtgcagtttataagctgtacacctttttagcttcagaaaaatgtcagactttcatcaagaaatctttagaattcattaaggctggctgaagtgttattatataggatataagggcaggaaaggagctgatagttacagcaatgagcagaatgcgaaatgttttagaatatttggagcaaagtgcggaacgcttcccggagaaatcggccgtaacggatggtatctgtacatatacatataaagaattattagcgtattccaggaagatcggcagtgggattgcggcatactgcagatcggaacagccagtcgctgttcttgcagaaaagggggccgatacattggctgcttttcttgggattattcaagccggctgtttttatgtgttgatgaatccggagctgccaatcggcaggttagagcaggtacagcaagttcttcaggctgcgtatattgtcacggacagggaacatcgggagatggctttgcagattgtgcctgagcatcaaatcctttggatggaagaactgatggaaaccgatgagaatcagacattattaagtgagcgcagaaagcgtgccatagacacagcaccgctgtatgctaattttacttcaggctctacggggcagcctaagggtgtggttgtcagtcatcggagtgttctggattttattgatgtttttacggaattatttggcattacatcagaagatcggattgctaatcaggcaccttttgattttgatgtttctgtgaaagatatttattcttcactgaagacaggtgcaacccttgtcattgtgccgaagcagctgttttcacaaccggcaccgctgttggattatctctgtgaccatgaagtgacggtgatgatctgggcagtatcggcgctttgtctgatcagtatttttcatggattggattataaagtgcctgcaaaagttcgaaaagtattgttcagcggtgaagtgatgccgccgaagcatctgaaagcctggatggaccatctgccggaagcagattttattaatttatatggtccgacggagatcacatgtaactgtacataccacagaattgacaggaaccgtgattattcagagggcgtccctgtcggaaaggcatttccgaatgagcatgtctttttgctggatgaacaggatcatgagataacagaaccggacaaggcaggtgagatctgtgtgcgcggtacagcgctggcccttggctattatcggatgccggagcagacagcggagcattttgtacagaatccgctgaatcattgttacccggaactgatttacagaaccggagatctggggcggtataatgaatatggagaaatcctttttggcggcaggaaggattatcagattaagtatatgggacaccggatcgaacttgaagagatcgagcgcgccatggaggacattgaaggcatcagcagagcctgctgtatttttgatgagaagaagttgaaattgtatggcttttatgtgggcgaaatcgagaaaaaggaactgcatcaccggatgagcagcagtttgccgccgttcatggtgccgggggctttgagaaaggtggagcagatgccgcttaccaagaatggcaagacggacagaaaagcattgatggaaaaacatgcaaagggggcaagagcatgatgacagatgaacagatgatggcattggcccagacctatcagacaccgatgcatatttttgatatggcgatattgaagaagcgggttgcttttctgaaaagtcatctgcctgaggaggtttcattgtgttatgcagtgaaagcgaatacatttattattaaggaattatgcggacaggtagaacgctttgaagtgtgttctccaggggaattggcaatctgccgtcggctgcagatcccgatgcgccaggtggttttatccggtgtatataagacgccggcagttatggaggctcttttcagggacggtgtagatatcggtatttttacggcggaatccatggaacagtatttgttgctggccgggcttgccgagcgatatacgatgaagatcagactgctgctcagattgacaagcggcaatcagttcggcatggatgagaacgtgttgattcagacgatccgcatgagccgttcgaatgaatgggtggaagtggaaggaatccagttcttttcagggactcagaagacttctgtcaaaaagcttagacgggagctgacatatgtggatgccgttattcagagactggagacggaggaaggtttccgggtgaaagaacttgaattcggaccgggacttcctgtattctatttccagggcgatgattttgatgaagtttcatttttggcagagttttcagaaatgctgagtgagatgaccagtcaggtgaaactgacctttgaacttggcagaagtatagctgcatcctgcggaacctatatgacttctgttgtggatgccaaggtgaacaagaagcagaattatgccattgtggatggcggtattcatcagctggtatattatggacagtctatggcaatgaaacatccgtattgtcatgtcctgcctgagaaacaggaaggtgaaaccatggactggaatctatttggttctctgtgcacagtgaatgatatactggtgaagcagatgccggtcagaaatctgacggtgggagatgtcattgtctttgaaaatacaggggcctattcaacaacagaaggcattgcgttgtttctgagcagagatcttcctaagattcttttgagaaaagaggatggggagatccatgtgctgcgggacagcattgacaccgatccattgaatacaccgaattatcatgaatagacaagcagattgaaattatgcagcgcatgctgcatacattatggaaggagattatgaatgatgaaagaacagattattgagattttagaggatatccagccggaggcagattatgagacatgtcagacattgattgatgaccatattctgacatctttggatgttttatcattggtggctgaactggaagatgaatttgatgtaacaattcctacagttgagattattccatccaattttaattcagtggatgcaattgcggcaatggttgacagacttcaggaagagggctaggaatgaagtcttacgttgcaccgttatatctgttggtatttcttccggcagttgtatttttatataatattgtccctaagaaactgcgtccggtggtattgcttctggcaagttacctattcttctggagtatcagcggcaaattgattttgtttttgcttatttccacattttcaatccatcattttgggttgtggctgtcaagccttcaggaagaacgtaatcggattcttgccgaaacagagcgtcctaaaagaaaggctgtgaaagctgaatatatacgtcgtcagagatgggttattttcctggctgtctgcatacatataggaacgctgcttgtgctgaagtacacggcctttttcggtcagaatttgaattcgttgctggcattggcaggggttgactggacatggaagatccctaaaatggtgatgccgatcggtatttctttttacaccatgcaggcgatgtcctatattctggatgtttacagggaaacactgaagccggataagaatatcggacggctggcactttatatggctttctttccgtccatgatggagggtccgatctgcagatataatgatgatgcggtaagcttatgggaaggcagaagaagcagtgttcagaatcttgtctttggtgctgaacgtattttgtatggtgtcatgaagaaaatggtcattgcagaccgattgaacattatgatcaagacactgtattccggttatgcggattatgacggcggcatgatggttgtggctgctattgcttatacctgtcagctttatatggaattttcgggaaccatggatgtggttatcggaagtgcggaactctttggtatcgttcttccggagaattttaaacgtccgtttttttcaaagagtatttcggaattctggacacgctggcacattacattgggtacatggttcagagattatattttctacccgatttctatgtcaaagcctatgaaacgtcttacatcaaaggcaaggaagaaaatcggtaatcattttggaccattgattgccggttctattgcactttttgttgtttggctgttcaatggattatggcatggtgccggatggcattacatttgtttcggcatgtatcactttgtactgatcgcttctgccaatgcggttgaaccttataccaagaagctccttgagaagctgcatattcgccgcgaagaaggtggctataagtgtttcagaatcgtaagaaccgcattgcttgtatgtattggtgagctgatattcagagccggcagtctcaggattgccatgcgcatgctgaaaaaaatgttcacagatttcaacttcaaatcctttacagacggtacgctgctgaatcttggtatggacaagtatgatttcctgattgtggcggtttcggtattgattgtgttggtgatcagcattgccaacgaaagaggaatctgcattcgtcagaaactggcagagaaaaaggttgttgttcgatgggctgttgtctacggacttattttattctgtattatatttggtgcgtatggtatgaattatacaccggtcgatccgatttatgcaggattttaggagggacagcagatgaagagatatttaaagacagctttgcgttttatcctgttctgtgtgatctttatggtcattctgatgcttttgtccaaggtgtttgtgccgaaggataatcagaaatcggcaggaatggaagcggtacagagtaatggtattcttggggaaccggacaacacgatggattatctggtagtgggagacagcgagacctacagttcgatcacaccgatggagatctggcgtcaatacggctatgcaggttatgtctgcggaaccggcggccagcatctttatgatacagagcgttttctggctcaggctctgaaaaagcagtccccgaagtatgtcattcttgaaacgaatgccctgtatcggaagacggcttatgaaaaggttctcaagtcccagttggaaaagtattttcagattttcaggtatcatgatcgctggaagagtctgacgatcaatgattttactggatccgtcaactatacatggaccaatgactacaagggttaccggtatgagaacaaagtggcatctgcggctttaaaagactatatgaagcagacagatcagaaagcaaagatttcggccatcaaccaatattatgttgagcagatgatcaaattgtgcaggaaaaataatgtcgagctgatattggtcagcacaccgagcattaagaactggaattatgccaaacacaatggcatacagaccctggctgatcagtatggactggaatattatgatctgaatctgatgccggatcaggtgaagatagactggaagaaggatacccgtgataaaggcgaccatttgaatcatacaggcgccgtgcaggtcagtgactggttgggcgctttcttccacagtaaaaatacactgacggatcaccgtcaggagacggcatacagtcaatggaatgatgcattgggaagatatgatcaacaaattgctgatggaacagcaaatgagatatcccattgcaagaaataacagttgggggcaggctgtttgccggataggactgtgaaaggaactacgcattatggggtataatatattacttgtggcggatgacagagaaacaaaggaattgcttatgctgcatttgaacagcaatgggtttacggttgatattgcagaaaatgaggagatgtttaatgtctgtttcgggcatcagaaggcgaatttgattctgatcgatatgatgatgaaaagcctcaacatatatgaattgatcagagtgatccgcctgaagagtaatctgccgatcatattgatcgcagataaagagaatgatgccaatcgtattctgggattgaatcttggggcagatgcctgtgtgataaagccgtacaatcctctggaggttatagcagaggtgcaggctatgttaaggcgctactatgaacttggatgcggcggcagaataccaggagaaacgatggtattgcgcgtaggggaactggtgttggatacggaggcttttgtgttgagaaaaaacggcaatgttctttctctgacatcagcggaattgaaaatccttgcgaaactcatgcgttctccgaaacgcgtttttacaaaaacacagttgtgtgaatgcatcaatggcagatattatgaaaatgatgaccggacaatgatggttcatatttccaatatccgtgctaagattgaggatgacccggccaacccgaagtatatcaaaaccgtccgtggattcggatacaaaatcgacagtgatgattaatcatagaagaattgcattaattttcaaaaaaactgttgacaaatagagggtatctgcgatacaataccacctgtaaagtaaaaatactttacaggtggtgctgttttatggagaaatttattgaagaagcgttgctttatgatttttatggagaactgttgacagaacatcagaagctgatctatgaggattttgttttgaatgatctgtccctgagtgaaatcgcggaagaccgtgagatcagcaggcagggcgtgtatgacattgtcagacgctgcaggaaacagcttcagggatatgaagcgaagcttcatcttgttgcgaaatttattcatacgaaggaacgcgtcgcagagatcaatcattatgcgaacgagattcttgagcatcaggaggatcatcagaggatgatagaatgtattaacaggattgagatgctgtccaatacaatcgtagaagaattgtagaaccggaggcgaagctatggcatttgaaagtttatcggacaaattgcagaatgtatttaaaaacttaagaagcaaaggccgtttaacagaagcagatgtgaaagcgtcactgaaggaagttaaaatggcgcttcttgaagcggatgttaactttaaggttgttaagcaatttattaactccgtgacagagcgggcagttggtcaggatgtgatgaacagtctgacacccgggcagatggtcattaagattgtcaatgaagagatggttgctctcatgggcagtgagactacagagattaagctgaacaatagcaacgaactgacagtcattatgatggctggtctacagggtgcaggtaagacgaccacttctgcgaagattgcaggcaagctgaaagcaaagggacgcaagcctctgctggtagcctgtgatgtatacagaccggcagccatcaaacagctgcaggtgaatggtgagaagcagggtgtgcctgttttctccatgggagatcatcagaatcccgttgatattgcgaaggcagccattgagcatgcgaagaacaatgatctgaatgtggtgattctcgatacagctggtcgacttcatgtggatgagaccatgatggaagagttggcgaatattcagaaggctatcaaggtagaccagacaatatttgttgtggatgccatgacaggtcaggacgcagtcaatgttgcgaagtcctttaatgaacagattgagctggatggtgtgattctgacgaagatggacggcgatacccgaggcggtgcggcattatccatccgagcagtgacaggcaagccgattctgtatgttggtatgggtgagaaactctctgatcttgagcagttctatccggatcgtatggcatcaagaatccttggtatgggtgatatcctgacattgatcgacaaggctcagagccagattgatgaggataaggccagagagctgaatcagaagatcaagaaggcgacatttggttatgatgatctgttggaatcactgaatcaggtgaagaatatgggcggcattacagatatgctttccatgcttccgggtgtaggcagtcagctgaagaatgttgaggttgatgacagtcagttcagccggattgaagcaattattctttccatgacgccgcaggaacgtgcgaatccggatttgatcaatccgagccgcaagaagcggattgcacagggtgcaggcgtggatctcagtgaagtgaacaagttggccaagatgcttgaacagatgaagaagatgatgaagcagtttggtggaaacttacctaaggcaggcaaaagaggaaaattcaaatttccttttagtatataattaattttttcaggaggtgaaagaacatggcagttaaaatcagattaagaagaatgggtcagaagaaggctcctttttatagaatcatcgtagcagattccagatccccaagagatggtaaattcatcgaagagatcggttactacaatccaaacgttgaaccaagtgatgtaaaggttaacgaagagctcgctcagaaatggttatctacaggcgctcagccaacagaaatcgttagcagacttttcaagaacgctggcatcattaaataattgatttacagtgggggaatctgtaatgaaagaattagtagaagttattgctacttcactcgtagatcacccggaagaagttgtcgttacagaaactgtaactgacaagtctatcgtcttagagctcaaagtggctcctgatgatatgggaaaggttattggcaagcagggacgtatcgcgaaagcaatccgtaccgttgtcaaatctgcagcgtctaaggatgataagaaagtcattgtagaaatattgcagtagaaactgggagctgtcgcggttgttctggaaaggttttggcctttcggaatatgcggcggctttttgtgtcatagatgatttaattgagatatcacatggaataatttttgggaatttcccggttttatatataaaggaaggaaaacgatggaaaaatatttgcgcgtaggtgttatttcgtcttctcacggtgtgagaggagaagccaaggtatttcctacaacagatgatgtacagcgttttaagaagctgaagacctgtatccttgatacaggcagagaatataaggagcttcatatagaaagtgtcaagttcttcaaacagatggtcattttaaagttcaaagagatagcatccattgatgaagtgatgcagtataagggcaaggatcttcttgttaccagagatcaggcagtaaagttggaagagaatgaatatttcatctgtgatctgatcggactgaaggttgtgacagatgaaggtgaagattttggcgttctgacagatgtgattcagacaggggccaatgatgtgtatgcggtgaaatgcccaaatggcaaagaagtactgctgccggtcattgatgaatgcatcctggatgtggatcttgagaggcagcaggtaacagctcatatcatgcctggacttgttgactgataggagagaagtatggattttcatgtaatgacattatttccggatatgattatgcagggactttctgacagtgtgatcggtcgtgccgtcagaaaaggaaccatcggcctgcatacagtgaatatccgtgattattctctggataagcataaacatgtggatgattatccttatggcggaggcgcaggtatggtgatgcagccggagccgatttatgcctgctatcaggatatcgtcggcaagatggataaaaagccccgtgtgatctatatgacgcctcagggcagagttttcagccaggaaattgctgaagaattgtcaaaggaagaatctctgatttttctttgcggtcattatgagggcattgatgagcgtgtgctggatgagattgtcacagaccatctttctattggcgattatgttctgaccggtggcgaactgccggccatggtgatgatcgataccattgcccgactggtaccgggggtactcaacaacagtgaatctgcggagtatgactctttccaggatggtcttctggaatatccccagtatacaaggccggagatctggcatgacaagcaggtaccggaagtccttttgtccgggcatcatggcaatattgagaagtggcgcagacagcagtctttgaagcggacctttgagagaaggccggaactgctggaacaggaggaagtacaggaggctttgacgaagaaggacagagaatatctgtcagagctggaaaatcctgaggatacattgtgaaaattttgaaggaatcaaagaaaatcgtcaaaatgacttgcatttcagtgaatcctatgataaaatgtaatgcgctggtgcgtaagcgtatcactgcagttgctctttagctgatgtacgagtgatatttggcaccggcggtaattgtaagaaatggatggtcctctgctgcaggagaatgcattaagaacatctggatattataaggaggttcattatgaacgatattattaaaagcattgaagaagctcagttaaaatctgatattacaccattttctgttggcgatacagttaaagtatatgctaaagtaaaagaaggcaacagagaaagaacacaggttttcgaaggaactgttattaagagacagaacggcagcaaccgtgagacatttacagttagaaagagctctaacggtatcggcgttgagaagacatggccgcttcattccccaatcgttgagaagattgaagttacaagacgtggtaaagtaagacgtgcgaaactgttctacttaagagacagagttggtaagaaagctaaagttaaagaattggttaaataatcagtaaacacagaagtaagataattgggacaaatacatatgtacttgtcccattttctttagtgagggcggtaaatgagaaaagttccattatcaaagaagcaaaagcgtgcagagaagattaagaagacattgatccatgtcggtatctggcttcttgggctgctgatagttattgcacttggtgtttttgcggtgcgtggttttggtattaagacagtgatcattgatcagtcgatgaacccgacactgcagaatgaagatgttgtattgctgaataagctctcttataagataggttcaccgaagcggatggatgttgttgctgtcagaatcggtgcatccgagaacagtccgacctatgtgcggagaattatcggtcttccgggggagactgtacagatcaaagacggcaaggtgtatattgatgacactgaactggaactgacatttaatgatgcggccatagagaatgccggtgtcgccgagaagggtgagacccttggagacaatgagtattttgttttatgtgatgattataataataaccgggatgacagccgattagacagtataggaactattgattcggatcagattctcggaaaggtatggctgattcgttcaccactgtcacgccttggtctggtacattaaacacaggacattattgaaattgaacagttaagaacaggagaatttatgaatatacagtggtatccgggacatatgacgaaagcacgtcgtatgatgcaggaagatattaagcttattgatattgtgattgaactggtggatgcaagactgcctctggccagcaagaatcctgatattgatgatttggcgaaggggaaggcaaggctgatccttctgaataaatcagatatggccgatccgaagtacacaaagctttgggagagctatttcaaggcaaaaggattttttgtacttcagattaacgcacgtaccggtgccggtatgaaagctgttaccggtgttgttaatgaggcgtgcaaagagaagattgaacgtgaccgcagacgaggcattaagaatcgcccgatcagagcgatgatcgtgggtattccgaatgtaggaaagtccacgtttatcaacagctatgcgggcaaagcctgcacaaagaccggcaacaaaccgggtgtaacaaagggcaaacagtggatcaagctgaacaagaatgttgaacttttggatacgccgggaattttgtggccgaagttcgaagatcaggcagtaggacagaagcttgctatttccggatcgatcaaggatgatatccttaatattacagaacttgccatgaagctggcagattatatgagtaagaattatccgggaacgatggcttctcgttatggtattgaagagagtgacgacagtgtgaaggtactggcggatattgctattgccaaatgttgtttgatgaaaggcggagagccgaatatcgacaaggcagcttccatgttgattgatgatttcagaagtctcagacttggaaaggtgacactggaacagccgcctcagtcagaagaggaatgatagaaattgattcaggaaaagattgagataatcagagataagttcaagaatgcatcaatagaaaaactgccggaattgatgataacttaccgagaagatggtcgaattggtgtcggcaagattctggaaagggcacagaagaaactggatgcgtacaacaaagaacttgatcgtgtgcagaagatgctttcttatgaaagacagtatggagaatgcggtgttagctgcggcattgatgaagccggacgggggcctttagccggtcctgttgttgcagcggctgttattttggatataaactgtccgattctttatgtcaatgattctaagaagctttcagagaagaagcgggaagaattgtacgatgagattatggagaaggctgtcagtgtgggtgtaggcattgcgtcaccggagacgattgatgagattaatattcttcaggcagattatgtggccatgcgggaggctgtgagtcagttgacaccgaagccggaagtattcctaaatgatgcggtgaccattccgggcattgagggcagacaggtgccgattatcaagggtgatgccaagagcctttctattgcagcggccagtatcattgcaaaggtgacaagggaccgtatgatgcgtgagtatgacaaactgtttcctgagtatgattttgcaaagaataaaggatatggaacagcggagcatgtggcggcactaaagacatttggaccaacgccgattcacagaagaagttttatatccaatttcatttagtgggggacggtgtatgaaccatgtcgagaaaggccattattatgagcaggaggctgcagattacctgatatcctgtggctatcggattttggaaacgaattaccgatgccgtcatgcagagattgacctgatcgccatggatggtgactatcttgtttttgtggaagtcaaatacagacagtctgacagggttcagtcaccctctgaagcagttgatgggaagaagcagcgacagatcagtctggctgcagatcaatatttgctgaagcataaggtgagtgaggaacagctttgccggtttgatgtagttgcttttttgaaggaacggccgattttatataagaatgcatttgagtatcagggagcgaaaggatggtagcagtgacaggaagcggaacaacagaattgaaagagaaaaatcacgtgccgtatatacagtttaagaatttgtctgccacaggcattgtgaagcatggtttttcaacgagaaaaggcggtgtgagtaccggtattttttcgtcgatgaatctgaatttcaagcgcggagatgattcggatgccgtgttggagaattatcgcagaatggctgctgccctgaatatgcgtgtggaggatatggttttatctgatcaggcgcatacaaccaatgtccgtgtcatcacagaggaggacaggggcaaaggcattttgagaccgcaggattacagtgatgtggacggcatgatcaccaatgttccgggaattgttcttgtgacatcatatgcggattgtgtgcccctttatttcgttgatccggttagaaaagccatcggtctgtctcattcaggctggaagggaacggttggtcatatcggacagaagaccgttgagaagatgcatgaggtctatggctccgagccgaaggatatcgttgcagccattggcccttctatctgccagagctgttatgaggtcagcgatgatgtggcggaggctttcagagccaattttacagccgatgaggcagcagatattttgcttgataaaggcaatggcaagtatcagctggatttgtggaaagccaattggtatgtactgacagatgcaggcattcttcctgaacatttgtctgtgacagatctctgcacagcttgtcatccggaccttttgtggtcccatcgaaagacaaatgggcaaagaggcggtttatctgcgtttctgtccctgatcgatacgtctgtttagaaaacggagtagaagaattatgaagaaacatttacatgtgatccagtcaattgttcccggcagtattgcagaggaaatggagctgcagcccggtgatacagttcttgctatcaatggccaggatatcgaggatgtgtttgactatcattatctggtcaatgatgaatatattgaaatgctgatccgcacggctgatggaacggaagaagtgctggagattgagaaggattacgatgaagatatcggtatcgtattcgagtccagtcttatggacgattatcgctcctgcagcaataactgtattttctgttttatcgatcagcttccgaagggcatgcgtgagacgatgtatttcaaggatgatgattccagactttccttccttcagggcaattatattactatgacgaacatgaaggacgaggcgttggagcgtatcattcgatacaagctggaacccatcaatgtttcagtgcatacaaccaatccggaactgcggtgtatgatgctgcacaaccgttttgcgggcaagatcatggagcagcttcagaaactttatgagggcggtattatcatgaatggtcagatcgttctctgcaagaacgtcaacgatggtgaagaactggagagaagtattcgtgacctgtccggctttatcccgaacattgagagcgtttctgtggtaccggtaggcctttctgaccacagagagggtctttatccgttggaaccttttaacagggaggacgccagaaaagttattgcctgcattgagaaatggcagaagaagttgtatgaggagtatggtacacactttatccatgcttcggatgaatggtatcttctggcgggatatgagatgccggaggaagaacgctatgacggttatcttcagctggaaaatggcgttggtatgatccggcttctgacggaggagtttcatgagggactgaaagaagctgttacagacggcaaaaagcgccatgtgacgattgcaacaggacattctgctgtgggaaccattcgaaaactggcagaagagctttgtgagaagttccctaatgtgaccgtagatgtctatgaaattgtgaatcatttttttggagaacagataacggtttcagggctgatgacaggaacagatctgaaggaacagcttcagggcaaagatctcggtgagacgctgctgcttccggtcaatattcttcgaagtggtgaggatgtgcagatacttttggatgatataacgattcctgaacttgaaaatactttacaaattccgatttcgattgtacaatcaaacggacaggacctggtagataaaattctgggaagaggtgagatagatgagtaaaccaattgtggctattataggtagaccgaatgtaggtaaatcaactttattcaatgccctggcaggacagcagatttctattgtcaaggatacgccgggagtaacaagagaccgaatttatgcagatgtaaactggctgaatacacagtttacaatgattgatacaggtggtattgaaccatctaccaatgatctgatcttgaagagcatgcgtgagcaggctgagatcgccattgagacagcggatgtgatcatctttctgacggatgtgcgtcagggggttgtggatgcggattttcaggttgccaatatgatccgtcgttcaggcaagccggttgttctcgttgtcaataaggtggataatttcaagaccatgatggcggatgtctatgaattctataatttaggactgggagatccgatgccgatcagcggcaattccaagcttggactgggtgatatgctggacgaagtcatcaagcattttaaaccgggtacagcagaagaagaggcagatgaacgtccgcatgttgccattgtgggtaagccgaacgtaggcaagtcatccctgatcaacaaactgacaggtgagaatcgtgttattgtcagcaatattgccggtacaacacgtgatgccatcgatacggtgatcaagcacaacggcaaggaatatgttttcatcgatacagcaggtttgcgccgtaagagcaagatcaaggaggatattgaacgttatagtattatccgtacggtttcggcggtggagcgtgccaatgtggtggttctgatgattgatgccaaggaaggtgtgacagaacaggatgccaagatcgcaggtattgcccatgagcgcggcaagggtatgatcattgcagtgaacaagtgggatgccatcgagaaagatgacaagaccatgaacaagtttaccaaggatgtcagagagaagctggcatttatgccatatgcagagatgctgtttatctcggcagagacaggtcagagactgccgaagctttttgataccatcgatgcggttattgagaatcatgcaatgcgtatcggtacaggtgtcctcaatgagatactcagtgaggctgttgccatgaaacagccgccatcagataagggcagacgtctgcgtctttactatattacacaggtatctgtcaagccgccgacatttgtcatctttatcaacgataaagaactgacacatttctcttatacccgttatatcgagaatcagattcgtgaaaccttcggattccgcggtacgccgcttcactttatctatcgtgaaagaaaggataagggttaaaaatggcaattaaagtcattatctgtctggtactgggttatattttcggatgttttcagacaggctatttctatggcaaattattcaagggaattgatgtccgcaattacggcagcggcaatgccggaacaaccaatacccttcgaaccctgggcaagccggccggctatattgtctttcttggggatgccctgaaggcagtatttgccgtttggattgtgagatatctgctgttcccgggacttggtgatgtgacgaagattctggagaccgtcacggctcttggtgttgttatcgggcacaattatcccttttatatgcattttaagggcggcaaaggcattgcggcaaccggtggctttatgtttgcactggatgtgcgcatcgccctgatcgctgcgattgtatttgcggttgtattctttacaacacgatatgtctccgtgggttctttgaccattacggcactgttcccgattctgatgctgatcttttatcctggacagtgggtggtgtttggactcagtctgatattcacggcactggcttggtggcggcatcgggcgaatattaagcggctgatgaatgggacagagaataaatttgagaaaaagaaacggtaatagagtacgaattgcgaaacttcacgtttatcgaaagaatccgtgttcaacgattcaaagcaggcacgtttgcactgcctaatgctggcagcagtacataaggtcctaaagaacaggacctaagtactggccgcattagaagcacctgcttatgaatgcgttgaacacggattctttttgtaggatgtgagtttcaatacaaggtggtctttgatgattttaaacaatattataactttttagatggagatatatatgaaaaatctgttaaacgctcttgtaagcaatactccgaaggagtcaatttcggaacatcctttttctagtgatgagagaaagagaggagaagaattattaaagcagtgtccagtgcactcttactattgacagaaaattatgacgtatctcttaaattttctaacaatgattgctgactgagagatgccatgttatacttaatatatattaatgcagtcatgattggtgtctgaaaggaggcagtttatgagagagtttctggtttcgggaacgatgccgtttattttggtgatgtcagtgtattttctggtaaggtttgtgatgtatcttctgccttcgaagtcaaaggggacatttcttttcaaggctcagtggcattttaagaagtcatggctgattgtgccgactgttgttttggttgtcgtttatacaggttttggcctttggtttagcgcggataagatagcggacagaggattagaacgaatcttgcagtggtgtctgttgtgcctgccgattctttgggtggtactgatgtttttgccggagaaaatctatacaaacggtgtttcggatatcacacatttcgatatgtggcgtgaaattgcaagggttgagccaatcggggagaatgcttataagattgttcagcgaagtggtgtaaaatataaactgtatctgcatgaaggcgatagactgcctgtcaatttgacaacaccagatgatatagtgacggaagcttttaaacattagaatttatagaagaatatgttccttaaattgtctgctgctcaggagagaaaggattctctgatagagataattcatacgtctaagaggcatacctctttcatatagtatatggaatgattgtaatatacttatggaaggggtatttttatggatgaattgcgtgtatatagagatattcagatgcgaacgggcggcgagatctatattggcgttgtagggcctgtacgtacaggaaaatccacttttatcaaacgttttatggatctgatggtgcttccgggaattgataatgttcatgagagggaacaggccagggatgaactgcctcagagtgcggcagggcggacgattatgacgacggaaccgaagtttattccgaaagaagcggtttcggttcatatttccgatgatatccaggttaagatacgactgatcgactgtgttggctttatggtggatggggcgtcgggacatatggaggatgataaggaccggatggttaagacgccgtggtatgaggatccgattccttttacaaaggcagcgcatatcggcactcagaaagtaatccgggatcattctactatcgggcttgtgattacaacggacggcagtttcggtgagattgccggggaaagttttgcggcggcagaggagatggctgtaggtgagctgaaacaaattggcaagccatttattgttgtggtgaatacaatccggccttatgctatggaaacccaggaattgtgccgcaggaaggaagaaaaatacgatattaaatgtctgccgtttaactgcgatcagctgaagcaggaagatatccagaagattatggcaacgatgcttttggagtttccggtatcccagattgatttttatacaccgaaatggtttgatcttttgccggaggagggggaagtcaagacggcagtggcagatacagccagagaatatctgatgaatgttcgccatctgaaggatgtgcgtccgatgcaggagaagctgacctgcccatacataaagaaatgctttattgaaacggtgagtatgagcgacgggaaagtcatctttcatctggagattgatcagaaatattattatgagctgctgtcagagtggatgggaatgccggtgaagggagactacgctttttacaggattcttcgccaattgtcggaaaatcagacagcatattcagcggtatctcaggcggtggaatccgccagagccaaaggatacggcgtggtggcaccagagaaagaggaggtgcttctggagcctccggtgcttataaaacatggcagccgttatggttttaagattaaggcaaaggcaccttcgatccacatgatcaaagccggaattgagacggagatcgcgccgattgtgggtgatcaggcccaggcggaagaattgatcacctccatgaacaatagtcaggaacaggatccgaaagccatttgggatacattgattttcggcaaaactgtgggacagctggtggaggaaggcattcagacgaaggtcacccggatgtcggagaatagtcaggttaagatgcaggaggccattcagaagattgtcaacgacggcaatggcagtgtgatttttattattatataacagattgccgagctgtttggtctgtggatggctgaaaggctgtgcagataattaagatcaaagtcaaaaatgtcgaaaatcgcagaaaggcagatggttttcggcatttttttgcgtattgatgtataggagatagctgatataatagtaataagggaaaatgtcgcctgtgatgcgactttataatgtaaaaaaagtgatatgctggtataaaagaaaacttattttatcaggagggtgaacattatgagtaaaaagggatatagcagaccgggattatttggcggaatcaatcattatgatgcgaatggaagaaaagtgggagagagcaggccgagtttgtttggcggtatgaatgattatgatgccagtggcaggaaagttggagagagtcgccggggaatttttggcagtgtgaatcactatgatagtaaaggccataaggtcggagaaagccggccgggaattttcggcggtgtgaatcattatgataataaaggccagaagaaaggacacagtaatccgggctttttcggcggtatgaatcactatgatgactaatgaacgtggataatgagacggaggctgtgcttagcatatgatattttatatttacggggacacggacattgaagtaaaggcggtaggggcatggcagacaggaaattgatagaagaagtcggaaaatacatagacagatattatgagccagcaagggatgacatcaagatagataaagaaatgttgtctgtttttgagaagattacccgactgcgggagaaacgggcagaagaaagaaatcagcaggagaatattgttcgtgaaagctgcgaaatagatgaatcggcggcggaacagtttgatatttccacgatgcagaagacgaagataacgcacggcatgtcttcagctatgccgatgaatcggaatattgatgatttgatgaatcagctggaagagactttttcacagagattgctgcgtatgattgatgagcgtggtatgacggattctgaagcttacacgaaggctcatgttgaccggcgacacttttcaaaaatccgcaaagatatacattatgcgccgaataagaaaacagtgctggcttttaccatagccttggagctgtctctcgatgaagcgaaggatttgttgagaagtgccggatttgcattgtccagaagctccaaaacggatattatcgttgcatattttctgcagcataagatttatgatatgttcgagattaatgatgttttgtatgcttatggacaacctatatttgaataaatgcagaggtatatttactgtatttagctgttgataataaaaataaaacaattcaggcgaatgtcgcctaacaggtgaccaactcagttggttctgcatgtaaaatatgatttaagaaaagcttataaacaagcaaagaaggtggtatttccacaaggggataccattatggcttgtaaaacgagccaaaaaggaggtaatcatatgaatgcagaattaactgagttgatttttattttggacagaagtggttcaatgggaggattggaagcagacacaattaaaggttttaatcacatgattgcgcaacagaaagaacaaggtaaaaaggtgaatgtgaccactattttgtttgatgatgaagtggatattattcatgacagatttccggtagaaattatagaaccgttgacggagaaagaatattacgttcgaggatgcaccgcattactggatgcagtcggaacggcaatagagaagactgataatgtacagaagcatcttccggaaacgcatagagcaggaaaggtgattgttgttattacaacagacggtttggagaattccagtgaacattacacacaggagcaagtcagaaggatgattgaggccagaaaggaatgcggctgggagtttctgtttcttggggctaatattgatgcaggcaaagaagcagagaagattggcattgcaagaaatcggtcagtgacctatgagaatgattccaggggtgtggagctgaatttcaaggcagtaggacgagctgtttcaaaagctgcagcagctgcagcggtaactgattttatcgaagacgattgggctgatgaaattcagacatataagaaggggagaaagtagtggaggatgtcagaagagaagaacgatgcgaatatttatttttggatatagaatggaatcaggtaccgggaacggtggggataggaggtcgtgagcctgttcagatagctgcggtggctgctgatggagaactacagattataaagacattttcaaaggcaataagattaagcaatccggcattacttaatgaaaagaccatgaaagtttctcatatgtcaactttaaatgttatgcagggcctaccagaagaaagcgttttaatgaattttttcaaaagttttccgatttacccttgtattgttgtatggaccagagatacttatgacttattgagacatgatatgaagaaatataaaatgacagtcaaaagccaccaggttgttattttgcaggatgtcattggtgttatcatgggacgcatgaatggaaaaatcggttttaaaaaagctttggaatgtgtcggagtagaatatgagccgaattatttgcattatgccaaacatgatgcagcttatttgcatcagttattcagaagtatgtatcggcaatatggtgagatgacagatgaggagtattgcatagccaacttagagactggaaagctgcacacagaggggtgtcagtatatacgaagaatgcagcaggggaaaatggtgttaaaacccaaaacagttgtttttcaaggttttgtaccatgtaaggtatgcggagataatcagacttggaagcgtttgaatattgaacttaaaagaaaacagaaatcatgcggacgaagaaagaatagactaaaaagccttccattgacagatgaaaatattgaggcaatctgtcagcattttcgagtggtctatagtattactgaccatgttgtgtttgttcgaacatccattgcaggatggattatttatttagatggtgacagagtgacaaaattgtttcatgagaattataggatgaacaattcggtatatagtaaaaagcagaagttgaagtgcacggagggatatcataaacagaaattgccgtcagaaaatttttacaatgtgataagctatataaaatcacatgattctggaattgtaaggaagatatccaagaaaagcagattagaaaagctttttgaaaaggttgaaatggagatgcagatgaatataatagaaaattaaaatagattagattttttaaagtctatcttcgaaaagtcgaatgaaatatttatagtgtacattgaagaatgaaatgttgtatgatacaataaaagagactgggaataaaagaacgaaaagaaaattttctcaaacaaaacaccaatgaaaatgcagattgatgaatgtggagaggtagattaaatggcagtatcatacaatggattatggaagctattgatagataagaatatgaagaagatggatttaatgaatcgagtacaaataagcagcagtacagtggctaagatgacaaatggggagttagtatccatgaaagttcttgagaaaatctgtgcggaactgggctgtgactttggcgacattgttcattatgaaaaggacaggaaagatggtgaacaatagtggaatatagtgcaggactgacatcaaaactattctggctgcaggaatccagaaagacggcaagttatattctggatggatatagtaaaacagacatccgcaagattgcttgggagaaaaatatctatcaggtgaaagcagaatatcgagcctatgaggtgttaaatggaacgtaccgaagggtatcagccttaccagaagcagtattacaggcatttatcacttgtgatgtagaaaccgtaaagattctgaatctgattgcaattttgatggacagcagattattttttgagtttttacatgaagtatacgacgagaagattcgattaggtgaaaaagtgatcacagacagggatctgaatgtcttttttgcagataaggcaatgcagagtgatgtggttgccggctggacagatactgcagtacggaagttaaaacagtgctttactagaatgatgtttgaggcgggattactggaaagcagtgcaaaaccaagaacaatcaagccaattcatattgattaccggacagaagaattactgactgcaaatgggcttggcgaatacttgaaagcagtgaagggagtctaaggatggcaagattaagtttggaagaacgactgaaccggattgaggataagatttctgaaaagtctttccgtgaaaataaaggacttggaaatgaagtcggatattacgtgtttgattacgatccgagagcagagctggaagtacggaatcatatcgcatacttaaaagacagaatcaacaatggcaataaagattttaaaatcatagaatttgacctgtttcacacgatgattcaggtattggaggaagaaggatatctggaagccttctttgatctggaaaaagacaatggcttttttgatatggcagacagtctggtagagacattgggattggatgaaacgaatgaactgaacctgattatttcaaagattttgcaggaagatctgacagacagcgtgattttcctgacaggagttggaaaatgccatccaatcattgcaagccataatattttgaacaacttacatcaggtactggatagtgtgccggtcgtgatgttttatccgggagaatacagcggacaggatttgaaattattcggcactatggattcacacaactattacagagcttttagattggtgtaagtacggaggataaagcgtatgcagattaaagatatgtttgagaagaagattgaccgtgacattaagggcgttatcaaggttggtcagtctgatgaggagaatgtctatcaggaattggacgaatatgttgtgacaaaagaactgttaaaacatttccgtgatttctttgataattatgagaaaggcattaatggcagcacagacaagatgggtgtctggatctctggtttctttggaagtggtaaatctcacttcttaaagattctttcttatttgctgaaaaacagtgtggtagaaggaaagaaagccatcgagtactttacagacggaaagaaaatcgatgatccgatgctgattgccaagatgaccaattccggaaccatttcttcggatgtcatgctctttaatattgattctaaaggatctgcaaaggttggatcagggaaagaagctatcgtggaagttttcatgaaggtattcaatgagatgcagggatactgtggatctattccatatcttgcagaatttgaacgtcagctagataacgaaggcagatttgaagagttcaaggagaaatttgaagagattgcaggggcaccttgggagaaaaagaggcaggcctttgcagttatccaggataaaatcgtaaaaaccatcgtagcgatggacttcatgagtgaggaagctgctcgcaactggtgtaagaatgcaaagggaagctatgacctcagtattgagaagtttgtatctctggtcaaagagtactgtgagaaaaaaggaccgaaccatcatgttattttccttgtggatgagatcggacagtatattgcagatgatacacagttaatgctgaatctgcagactatcgtagaagatctgggaactgcttgcagaggaaaagcatgggtgatcgttaccagccaggaagatattgattctatcacaaagacaaaaggcaatgacttctccaagattcaggggcgttttgataccagattatccttgtctgcatccaatgtagatgaagttatccggaaacgtatcttggagaaaaatgagatttcggaatctgcattgaagctgttatatgagcagaaagaatccattatcaagaatctgatcacatttacagcagacactgcagataaaaaattatatacagataagaccgattttgcagactgctatccgtttattccatatcagtttaatttgcttggacaggtattgacagcggtgcgtacccatggagccagcggaaagcatctgtctgaccagtcccgttctatgttggcactgttccaggagtctgctgttcggttaaaagacagccaggaaggtgtgctggtgcccttcagctatttctatgatccactgcataaatttattgaccatcagcacagccaggttattaccgatgcagaggataacagcagattggatgagtttgatgtggaactgctgaaagtgctgtttatgattaaatatgtcaaagagattaaggcaaatgtggataatcttactacattaatgatttccaatattgacgatgaccgcatagaactacgaaaaaaaatagaagagtctttgaaaaaactgattcatgagacattggtacagaagaatggtgagatttacattttcctgaccaacgaagagcaggaaatcaataatgcgattaaaaatgaatctgtagaaatgggagagattatcggagaagcatcaacagtgatttttgaggaaattcttccagagaagaaatatcgttacagcagcagatatttattcccattcaatcagaaagtggatgaccgctattacaagaataatcagtccaacgacatcggtcttacaattattacaccatatggggaagagtattcagattcagcgctgcgtatgctttcatcacagggacatgcggtaattgtgaagctgccgaatgacagtacatttctggatgaaatcacagaatccatcaagatatacaagttcttaaataaaaatgcatccggcgacaaaggcagttttgacagtatccgccgtgcaaaggaagacgaacgtattgagaagaaagaacgtatccgtattttcattgaagatgcactgaagcatgcggatatttatgtcaatggcgataaggctgtgattgcagcaaaggagcctgtgaaccgaatcagtgaagctcttggcaagctggtatccatgcagtacaacaaattgacatatatggagactgcaccggaggtttcagacattatgggcatatttgacgataacggtggtcagttgactttcttgggaaccagtgatacaacaccgaataagctggctctggaggatgtgattcaggttatcggattgaataatgcaagacgtatgatgacttctctgaaagcactgcaggacaaatttggcgcagcaccttatggatttgacccgaaagatgttcagtggctggttgccatgctctttaagatgggacgcgtgtcactgacttacagcagtcagaatctttccttgttgtccaacaagaaagaagaactggtacgatatctgacaaaacgtgaatttgcggaaaaattgctcatcgatatcagagaaagagccacggatggtcagattcgttcagctaaagaagtcatgaaagattactttggctttacattgtccagtgatgatgatgataccatcatgaagagtttcaagaataaagcacaggataaattgaagcttttcgatgatttaatgatagaatatcgcatcaatcccaaattgccgtgcaaacctgtcattgaacaggcaaagaagaatctggaagatattctgacgataaaagagcctgcagaattctttaaaatagtggataaaaacagggatgacttgctggatgatgctgatgatacagcaccggtattcgatttcttcaagagtgggcagaagaaaatatttgaacgggccttggagcagattcaaatattagagaacagtaaagtctatgtgcgtgaccaggagattatagataatgtggcacagatggaagccattgtcaaagcaaaaaagccatttggcaagattcagaatcttccggatatgtcgatgaaattcgtacagcagtatggtactttattggaaaaagaagcagatgccatgcgcccaattgtggatgatgacttgaaaaaagtactgagtgtattggacagcaaaacatttgccgaagtattccgtgacagaatgattcaggcatttgaagaactgcagcagaagctggaaacatctcaggagatagcagcagtcaagaacattcgactggaaagcgacaccgtcaagctgcgttgtctggatgagattacagagtatgaggaggcacaccagccaaaaccggatttggagccgccgactgttccagcaacaccaaaaatgggcaaagatggagagactccaattaaaccagtgacaccgccggttcagccaaaactaaagaagagaaagaatatttctatcagcaatgtggcaggggcgagaacctattctattgaaaatgagcaggatattgacaagttcctggcagagatgaaacaaaaattattacaagagttggaagagaatactatcattattttgagttagcataacgggatggaggttattcatttgaaaaagaaattctataagaggcttaaaaagactgttaaagatttctaagggtcttgaaaatgattattaaaggtctttaaaagtctctaagggtctctaaagagttactaaagatatccgaaagaatttctacagagttcgataggaactattaagtgggaggaaacagtacatgaacaagaatgcaattaagaaatttgcaatagcagcaagaaggagactcattgattctgtgacagacagagccggtatgattggtattacggccgagggtatcagtgaacctgtgacaaaaggcgcaggctttgaagtatataagacatctgcaggaacggaaatcacgctgactctagaacagtgtgaccagagaagacaattgaaaaagcagattgaatcccgtggcttcggagctgtggttgaagaagtggcctatacatggtttaacagaatctgtgctattcgatttatggaagtcaatgattatcttccgaacagagttcgtgtactttcctctgaaaaagacggcaaaatggagccagatattgtgacaagagcccttgaagcagagctggacttggctgaaaaggacagacaagccattatcgatttgaagatgagcggccaaccggaagatgcggacaaactgtatcgtatgttattcctgaaagagtgccatctgttgaatgagattttgccggaattatttaaggcagatgaagattcggattatatggagattctctttggaatttcttatgccaataaagatgatgtgatttatatgctggttaatcaggacacaggtattccagaggtggatttcaacgtatccgctgaagatgaagaaggcaatctaatcggccaggtagaaattattggctggctgtatcagtattacaatacagaactgaaagatgatacctttgcaaaactgaagaagaatatcaagattacgaaggaaagaattcctgcggcaacccagctcttcaccccggactggattgtgcgttatatggtggaaaactctgtgggaaaaatctggattgagcatttgcgtgcgattcatccggatacagatgaaaaggcaatagcagaaagctttggctggaaatattatcttccggaggcagagcaggaagaagctgtcaatgtaaagttggcggaaattcgtacaacatacaaagatttaaagccaacagatattacctgtattgatccatgtatgggaagtggtcatatattgattgccatgtttgatgtactgatggatatctatgaaagtgccggatatgacaaaagagaagcagcctttgaaattgttgagaacaatattcatggactggatattgaccagagagcctatcagctgtcatactttgcagttatgatgaagggacgcggatataacagacgttttctgcgtgaccgggatagaaagccggaaccaaaagtctatgccattgaggaaagtaatgatatcgatagaagtcatctgcagtttttcggaaatcatttaagcgaaaaagaacgcagtctggttgtgacgcagatggaaagtgctttggatacttttatagatgctaaagaatatggttcaattctgaatgtggaagcatgcgattggaatttgctggagcgatttgtagaagactatgaatcagaaagacagattggcttcgatgatatgggaagcgataaaacacaggatagtttgcgaagactaataaaggtggcaaagaatctgggacagaaatatgatgctgtggtcacgaatccgccatatatgggtgcttctggaatgggaacagatttgtcaaaatacgtaaagaaatattatccggacagtaagagcgatttatttgcagtatttattgaaaagtgcggtcagatgacaaagaaaaatgcgtatcaggcaatgattacacagcatgcatggatgtttttgtccagttttgaaaagctcagaaataaattgcaattaagtgatattgtaaatatgacacatcttggcccgagagcttttgaagaaattggcggcgaagttgtgcagacaacaagctttgtaataagaaaaagccatattgaaaaatttaagggaacatactgtagactggtagagccaactactcagcagggaaaagatgagatgttcctcgatgatgaaaacagatactttgcagagcaggataacttttcaaaaattccgggaagtccggtagcatattggattgaagataaatttttaaaatgctttgatgaaaaaaaagtttcttattatggagatgcgcttgaggggataaaaactggggataatgatagatttctcagaatatggtatgaagttgataatacctatatttctcttttggatgaaaatatggataattcaattaagtgggtgtttaccacaaagggaggaatttttagaaaatggtatggtaatattgaatatgtaatgtattggaaaaataatggccaagaaatatgtaattatccaggttcttctttttatcaaaaaaggaatatttttaggccagcgacaacgtggacgtatttgacttccggaaaaatgtcgttcagatatttagggaaaggatacttttataataataaaggtccagcggttttttgtgatacacagaaagatgctatgttgctgactggatttctaaattcaaatgtagcaaattatattcaacgttttatcaatcctacattaactgttttgccaggaaatattcgtaatattccatgtattttaccagaaaatgatgatatattccagcgattgattggagaaaatattaaattaagtgagcaagactggaattcttctgaaacatcatggaatttcaaataccatccattgttgaacaaagcagatagtattgctgaagcctttgaaaaatggagtgatgaatgtgatactcaatggaaaaaattgaaatataatgaagaagaacttaatcgcatcttcatcgatatttatggtttacaggatgaattatcaccagaagtagaagaaaaagatatcactgttcgaaaggcagatttacaacgcgatatccgaagctttgtatcctatgccgttggttgtatgtttggtcgttattcccttgatgaagaaggtttaatctatgcaggtggtgaatgggacagcagcagatataaaacttttatgcctgatgaggataactgcattccaatcacagatgaagagtatttttttgatgatattgtgggatatttggtagaatttgtcaaaacagtttatggcgcagataccctggaagagaatctggattttattgcaaaagcattgggtaataaaggagatacttccagagaagttatccgcaattattttctgaaagacttttatgcagaccatctgaaagtgtatcaaaagcgtccgatttactggttgtttgacagcggcaaggagaatggctttaaagctttgatttatatgcaccgttatgatgcagatactgtgggtcgtgtaagaacagattatttgcatcgggcacagaaatatgtggaaacagctatgcaaagtgcgcaatataccattgataatgcatcatccgcttctgaaaagtcaaaggcaagaaaggcggtcacaaaatataccaaacagcttgcagaaatgaagatttatgatgaagcaatttctcatattgccaataagcgaatagagatagatttggatgatggtgtgaaagtcaattatgcaaaattccagggcgtggaagtggcgcaggaaggcaagaaagcattaaaagtggatctgttgacgaagataaaataatataaagatgggaggtattcaggaatgtcatataaaattgaagaattacaattgaaaaactttggaatgattgagaattttaattgtaatcagttttcaaatattaatttaattataggtgagaatggaacgggaaagacttttttattaaaagcactatattctgctgtaaaagcactggaagaatataagcgcggagatgatataacaccaataaatgatattttatcagaaaaattaaggtggacattccaggtggagaagctgggtgatattgtttcaaaaagtgcagaagaaggcctggagtttcggatgaaattggacaaaatggcattgaattatcagttttctaaaagtgcatccagtaaagtcggaatggtagagcctatagaaaatggaaaagaaggcaattctatttttatacctgcaaaggaagttttatcattattttcagtgattttaaaatcacgagaaatagataagtcatttggatttgatgatacgtattatgaccttgcaaaagctttgagaatttctccatccagaggaagaaattatacggtatttgcaaactcacgcaaggtagttggtgatgttattgatggaaaagtcgaatatgatgagaatagtggcaaatggtattataaaaataaaaagaaccaaaaattttcgattggggcaacttcagaaggtgtaaagaagattgcaattatggatagacttcttgcaaacggctacttgaatacgaattctatcatttttatagatgaaattgaatcagctctgcatccgaaggcagtttgccagttcttagatatgattgataatatagccaacgaaatgggattacaggtttttataaccagtcattcatattttgtaatcaaaaaattatttttgattgcacttaaaaaagaaaatacagtgaaatgtatatctttgaataaggggaaggaggcagaaatatgtgatttgcatgatggtatgccagacaattccattatagacacttcgatacaattgtatgaacaggaaattgaggaggtgctttgatgggggttattattccagaatcagatatggaatttggggtatacaaagaagagcagatattttgtatagaaaagtgcagacaatatacagagaagctgcggcaacggggtgttcgctgctgtgaatttatattgttaaggtcaaataaattatgttttatagaggcaaaaagaagttatcctgatccaattggtggaatcgcgaaagatgaaaaacagtattatacagatataaaggaaattgcagaaaaaatgcgtcattccctgcagctgtatgcgaatattgttttgaatcgatattcgcaggatggcgtttcggaaggaatgaaaaatgcagagagtctagaaataaggttaatattagtgataaaaaatgcggacaagtcctggatagttcctcttcaagatgtatttagaaaagaattgaatgcagaaatgcgtatttggaaagtgcctgattttattatactgaatgaagaaatggctaggaaaaagcactttattgtttaaaaatagacgatgaataaagtgagagggttatggggaaaatgtattacacaaaattttaaagcaatcagatatagtagttgagtataaaattatcaacaatattgtaagaggaggaagacatgatgaaagtatggcatattacatcagatgtaggatatggcggacatttactctataatttgacaaataatgcaaagaaagttcccgaaccattgccgtggatagacccatctataaattgtttatacaaagaggcagtattatcttttatggtaggaaattatgaaagtgcattaattgatttatgcctgcttttggaacatgttctgagagctgcaattttaaatgatgaagattcaggaatgcaacgaacagatacagcatctcaattaaataagtatggttctttatcggaaacaatcaaagaggcagaaaatacacatttaatggatggatgtgataaagactggtgggacgcagtgtctagagttattagaaataagtctgcacattatgttttgccagttttgttgaaaagatgcgcaaaagaagaaaaacttcgtaagtatataaataaatatgagcttccggaaaataactcagaatattggtatgaatcacatttaataaactggggttctttttatcatggagcaggagaagaattggttgagggatttctacaagatgcaacaagagaactcaagatagttattgggaatacgaaatggaaaggtgatgaatcatggtggatttcattaaaagcgcaatacgattcatttttttcatataagtgggatattgaaaaattaaagtatagttttgaaaatgcggtaaaagattttggaagtattggaaagtaagacctacggagttaggaaaaggtacagatttcatcgtttaaagaggggattgagaaatcttgagaatgaactatttagaacataaaacattagtaaaatatggagatggattattggctcattcacaggaatggcagtggttaatagatgaaatagaagcacgttttgaaattaaagaaattggttcatggcagcagtatttgagtggatatgggcctatacgagatgtgtttgaatattttgtgaaagttctaaaggtatgcgacaaaagttggatatattccagaaaagaatttgaagagatatgggaaattgcaaagttttatatcggtatcattgatgttcgtgaatgtatggaaaaaatatcacacaatcaatgtaaagtattcttgttctgcatatggctgacaaaattagaaaatggagataatgaatgcgaatatttacttgatatgcggttgctaaatcaaagaaattattttgagttgattaaatgtgattctctattggaacatgagcaagaattgctggactatgcccacacaattgccgtagcaggattagatattcctttaaagtatttatgtgataatctcaatcaaattgaatacccgtgtaatacagagtttctattgaattacaagaaagaaattttaaattataatgctttttcgtttcaaaatattgctagagaagcgtgtcagacatggcaggaagtatatttgctagatatgctgaacgtatcattgaataaaagaaatattcagcctatgtatacggatacgaatgtttcttttccagatatatctggttggagcaaagatgttcttaatgctgtaaagagatattttaatcacagtattacaaattttgctgtagagtctgttgcatatgtgaaattcaacattgaaccatcaaaagaagtgaagcttcttcattgcaagctgctaatggaagcaatagaatccggggtggaaagttataaaatattgtcaagttcctcatatcatattctatcctatttattttgtgataaattgatgggagattgtaataaggaagaagcttgcattaatctaataaagagaatacagaaatgggaaaatccagcatggattataaatcttaaaaaagatggttatcctatttcaaaagaacaaagaaatttattatcagagtttcttgctaataagtataaacaaatagataatgtcttgtcactttatgatttaaaaaattatcttgaggacaagacaacagcaaatgcgattacgacagagtacctccggaaggttagtaaaaaatttgaaagttatacagaggaagaggcggggattcttgttgctgctgtatattatgagtatatgttgtatttgattgaagttaatcaatctaataccaatatagacaagcgatatgtccaaaaggaaatgatacatattcaaaaaatatggcaggaaaaaatatataagaagcaatgtggaaatttgcatgaattttcgcatgaacagaaaattgggacaaaagaactagaaaaattttctgatgtagcattattaaatcctgttatatttgcgaagaattgtacgccttcatcggaagatgaaatattgaatataatgatgagtatttctgaaaacccattgcttcatttatttaaaggaatgacattaacacctgtatttcctatggaaagagacaaaatagtatatgagcgtcatgatatcgataaaattttgcagcagtatgtgaatgacttaaaaaacaggaagggatataaactattaaatcaacttgattcaaaaatatttgtagcaggtattcatgcaagatacaaatttaatacacaatgttcaatgacattttttattaaagaagagaaattgtataatgaagttaaaaaagaatgttcaatagagttgttgccatatacgaatatagaatctttagcactattgacacagttatttccggtgctggaaatgaaaattcgtgaattggcaacactatttggaatatttccattcaagaagaagagtaatgaatttatgcaatataatgatccaagttcattactaagggaattaatagaaatgctttttgaagagcaacatagttttgaaagtgttccggatttaatatatgtttacaatatcatgtacaatagtaattcgtacaatgtacgtaatgaatgcattcatggcagagactatttgtcaggaggtagttttagatttgcatttcgtgcaacgctatttgcagtgcatatgatagactttagaataaaaacaattagaaataatgttagtgacattatagaattagaagaataaaagtcaaaaatttggtgaattaaaatatgagtgggagaaatcgatggacttacaaaatatacaagaacaattaaatacagaattctctaaatctgatacaagaattattttctggtttgatgataagggtgaatacgaagatgagatatccgaactgcagttggagcatgcgacgttacatattctgaatggcaccaactggttctattcaaaatggttattgaatgagtttgacacagaaggtaagtatcttgtatatgcaccatttccaaaaccaagtgatgcggagaatcctttagcggatatgtattattattctaaaccttattatacggaccgggtatctcagatgttacaggagcttgggtttgattctcgttttaaagcctacctggagcagtacagtaatttctggaagagcaaggtacgaatcgagcgatttgaagaacttggtatagaccatttcaatgtggaaaatattgatattggtcttattgctgtgcttacagatgttaaaacgccgaattttgaggagattataagaaagctgatattaaatgacagcaaagactatgtggctgcattggaagaaaatcatcttcaggaaaaattttgggagttatgcagcaagtattttggttaccaatcagaaaatcctaagattgaggatttggcagcatgcatgctgatgacttatgcagcatctgcattgagagatacgctgcctaaagtatttgaatcctatattttggcgaagagaaatgatgttattgtgtttgtcaggaatttgatggataatgtgctttatcaggaagcatacgatacattagctgataaagtagataaggcgttgaaagtgtcctccagagtgaaggatgagctgaagcgatatgcagataagaagaacaatccaaatggtcagctgatgcagctgcgagatattgcggaatgtgataccttttgtggatttgatgagatattgattgattgggcgctggagcagttgaatgatgaaattctggatgcgcagattgatggtatgaatattgccgaaattgctgaaaaacgtatttcgaaatcttatcattttggtactgcatataaaaaagaatatcaggcaatcaaatttgcttatcagatgatgaaagcagtttctgttctggaggtgagcagtgacattaaggaaatagctgctgaataccaggaacggatatatttgattgattcatattatagatggttttacaatgcttatgattgtatagaagataatgagcgtttctcacaggtgagagaacgtattgaaaatatgtattcctttacatatttgcagagaataacaccaaagtggaatcaaggattgacgggcgatttactagttgcttccggattgagacgccaggaagatttctatcggaattatttaaaagtttatgaaggaaagcagagagtgattgttattatttctgatgcttttcgatacgaatgtgccaaggaattgatggaaacactggaattagatgagaggtgtacaccgaagctggaggctatgattggcagcctgccgtctattacttctgtgggaatggccagtttactgccgcatgaaaatatgcaggtagatgaaaatctaaatgtgaccatggatggtcagccatgcggagatttagtttccagagataagattttgaaggtacagaatgaaaacaatatggcgttgtcttttgatgaaattgcaagtgcaaataaggaaagaacgaaagaattattacagaagaaaaatattgtttatatttatcataatcagattgatgccagaggtgataaagctgccagtgaaaatgaagtttttaatgcctgtgcagaggctgtaaaagaaatacacaaattggttcgtaaacttacaatgactgtctcagcagcaaaattctttattacagcggaccatggatttttatataagcgtgacagactgcaggaattcgacaaagtatcttacacaaaagaattctgtacttgcgcgaataagcgatttttaattacaagggagcagatgaatgacatgggtatgatgtccagacagattagttacatgaatatgctgtatgtgacaacgccgattggcgcggatatattcaaagttcctgggggcggacagaactatgtacatggtggctcttctttgcaggaaatgttgataccggttgtggaattgacgatgaattctcgtgcggttgcttatgattacgttgacgtcgttctcacatcaacgacccgtaaagtaacgaacttgattaccttcttcgattttatccagacggagaaagtgacagatactatgaaagcaagaagtctggtggcatactttacaacagaggaaggcgagaagatatcctttgatgtgccaatcgtagcaaacagtcgggaagaggcgccggagaagcgaacattccatgagaaatttacgctgaaatccagagaatataaatatggagataaatattatctggtgctggcagatgcaaatgatgagaaaaatattctgcagcagtatgaatttatgattgatattgcatttgtggatgattttgggttttaggagataaattaatgcgttttaataagcatcaacgagatataataaaagctataaaaaataaagaagtatatgatattgaaagctttgtaaaaaaatttaatttatatgaacattttgttgttgataaagaaaaaataaagaaggcttttgatgaatcagaattaggaaaagaatatcctgtatatgtatcaaaaaatgtgttggacttaaaaaacaaaagggaaattagtgttccggcaagattagaatatatggacaataagaaaaaagttacatttgataattgctgttatgaatatgatttatgggatgaaaaaggttttaatattgcaataaattatgatgagattgttggtttcatttctttgtgggaatatttaaagagagaattggatgtatttgaaatagaaaaaacagttagcagaagtgaaatcgagttgttttttagaaaatatgagaaaacgacaaataagtcgaatagtactaatgattacataccaatcgttcaagaagaactatttcaattgacggatggtaagttccagcggaaagtcggagaggtggattataatgttgtgagaagaaatgcatataattatgttgaagaggatgttgagattgataatgaacaattgaagattttttctgtttatttacataaaaaaattttgccaactcctagcctgacaaaatatgtttcaaatagatatcagacagaagatgaaaaagcaacaagactttctttaagaatagctattatttcaattattattgctatattctcatcttcgttttctgtgtatgctgcatttaaaatagatccatcaaatgacaacttgaaaataattcaagaaaagcttgatactatagaaaatagtattagagatgatatggataacaagacgaaaattgaaattcgattgagtaaataaagaggtgtgatatggacgaattcagtaattcacaagcgaatgaaacagaagacaagcgagaagcaattaaacaaaagctccgtcagtattatgatggtcgtattgtccgcaaggatttaacaaaatccatccgagaaggcgccaatgttccggtttatgtactggaataccttttgggacaatactgcaattctgatgatgaggaaatcattgcagaaggtgtagaaaatgtaaagcgtattctgagggataactatgtgcgcccggatgaagcacagaaaattctgtcacttttgcgtgaaagaggcagctatacggtaattgaccgtattacagttatattaaatacaaaggaagaccgttatgaggcaacattttctaatctgggggttaaaggaattccgattcatccggattatgtgaaggattatgatagacttctttgcggaggtatttggtgtattctgcagatggagtacgaatttatcgaagaagataagaagaatacacaaccaattcgtattcggaagctgaccccaatccagatgccgcatgtggatatggatgaggtaaggaatggacgaaaagcctttacaaaagatgaatggatggatattattctgcgttctacaggtttggaaccagatcagtttagtgagagagctaagtggctgctgattgcccgcatgattccgttagtggagaataatttcaatttgtgtgaattgggcccgcgttctacaggtaaatcttacatatacgagcagatttcaccaaacagtattctggttgcaggcggacagacgacagttgccaatctcttttacaatatgtccaatcatacagtaggtcttgtcggtatgtgggattgtgtcgcttttgatgaggttgccggaattaagtttaaagataaagatggtatccagattatgaaaggctacatggcttctggtgccttttctcgtggtaaagcagaaattcaggcaaaggcgtcaatggtatttgttggaaatattaatgaagaagtagacgtgttattaaaaacttctagtttatttgatccgttccctcctgaaatgggaacagatacagctttcttggaccgtatgcattgctatattccagggtgggaaattccaaaatacagaccgaattcttttacagaagattatggctttatcacggattatttatcagaatttatgcgcgagcttcgaaaggacaactatagtaatttgctggataagtatttccatctgggcaacaatctcaatcaacgagatacgattgcagtacgaaagatggtttctggctttatcaagttactttatccagatggagaagtcagtaaagaagaattgcgtgaaattgtagagatttctttggaacttcgacgcagagttaaagagcagttgaagaaaatcggcggcatggaattctatgatgtgaatttttcctatagagataatgatagtttcgaagaacactatgtttcggttccggaacagggcggcagcaaattgattccagaaggcatgagtaatccgggatgtgtctatacagtttctagaactaaaacaggaatgattggatgctataaacttgaaactcagatgatgcccggcaatggcaaattgacatgtatgggaattggttcgggtaaggaacagaaagaagcaacgaatacagcttttaactacttgaaagcgcattccaatgaaatatccggtcatataagtacgacaacaaaggattatattattaattatcaggacatgcagggtattggtatgacaaaaaatctggcaatgtcaacattagtagcaatatgttctgctgcattaagtaaatcagttgtttctggcttggttgttttaggtgaatttagcattggcggaaccttgctcaaagtggaggatttggcaagtacattacaggtttgtgtagacagtggagcaaaaaaagttttaatgccaatggtatcagcagcagatataggtggtgtaccggccgatttaattggtgcattaggattgaatttttattcatcccctgaggatgctgtattcaaagctctgggtgtggaatagtcaattaggtagaagacaaatgaagaatttaggcgaaattgtaataagagatagggcgttaaaaaatgaaagtgatgcaattgttgtgcaatatatttattcgctaatacgaaataaggagttgtcaagaattacattaaataaaagctttagagatgcaaagaaagagttggaaaatgcgcatattgaaattgatgctatgatatgtgatgaaagtgttatacgtcaggtccttaagtcgaaagcagaaaaatatattgctgacagaaaaaatgttattttgctgagggagaagtgtaaaaatctgccttcactaagtgagataaatagcctggattttacagatcgagtacatcttattttacaagcccatagatattataaatatgtgcaattagatgaaatgttatttgaagaagaaaatatcgtaatttatttggacacgtggattgaacaattttggaacgggactgtgaatttgagaaaaattaagtcaaatttaagacctgtttttcatagaatgttcggacaggaaggaaagtatttttatggtttacatttcaaaaggaataaatcgctagatggctatgtgttatcattgttagcttcttgtggaaaaggagataataaaaacaaaaaatataaggcacttacagaattttttgccagggttctttatgagggcggaagtatttatgaagttaagaatggtttaaataagatggatccggttgaaataggtgtagaagattttgttgtcagatgtaatgtttttagatgcatgaataaatcacatgaaattaaagatatgattggattaatcaaaatatgtgatgaaaatgggcaaaatcatttaatgaaagtaccagtgggatattgctcagaatgtaaagtttatttcattttgaatacaacatattatcaattaattaaaaatggtgatattttgtgtaaaataatagatgaaaaaacatacttaaaaagtgatggtttgcagcgtgctagattggcattgcagtctgtattaatgcaatatggctataatgtatcacaaaatgatggattaacagatgaacacagacagcgtattcttgcatttatcattgataataatatactttcaaaaagtgaaataataagctatttaaactttttcattagtcagaaacagaaaatggataatatgaaatgggcaattatgaaatggaatagagatagagaatttgtagaaaaatataaaaatgatgaagggataaaagtaaaaatcggtgctatacaaaaacaaagaaggtgatgacttatttttgaacaggatttcgaagagatgctcagacagcatcaggcatcgttagatgacaaaaagaaattcacggctttggtgaaagatttatttccggcccaggcgaagaatgtcaatttactgttgatggcatacaatatgggcattgcgcaggatatcaggaaagcaacttatatcaataatacatttgcttttcgatatgtaaagcagttgatggatgattttgggatgagccgtgtcaatgctgattggattgtgtcagtttggtgtgattgttatggtcataaagttcttggcaaagtctgtgacatttctgcgcaaaagcagggaaagggacctgccattcaaggagaacagactctttcgggcaaatcctatggtgacctttttgagtatacgaaaagcgggtatggcaatggacttgcggtcacagggtttcgaggagagaagaatcagaccattatttttcaaaacagatttggtaataagcctgttattgagattgcagccggaagttttgagagtacgcaaatagaagaggcgattctgacagaagggatcaatcgaatcagtgaaaaagcatttgcgaattgcaataaattacatcaggttgttttaccaatgagtgtagaagaaattgcagataatgcttttgaaaattgttatcatctgaaatctatttctcttccagcgatgctcaagacaatcggtattgctgcgtttaaaggaaccggattacgcacgatagatcttccgaaaagtgtttactggatcggagaagcattgatggcagactgccgagatttggaacgaataacgataccggacaatataaacaggatttccggaagcatgtttgaaggatgtacaaatttaaagaaaatcaatttgccggatagtttaagtgaaatcggcgaccgtgcattttttggatgcagttctttggattttgttgttattccggatagtgtgcagcaaattgggcaggatgcatttaccaatacagataagcagtttattattcaatgttcgtttggcacttatgcagaagaatatgccagaaagaataaaattaaatatcagttggtatagaagatatatttggcattgtcgcctgatatgcgacctctgttaaaataaattgcgatatattgattaaaggggtgagaagcttgggatttttggatgcattgtttgggaacaggaaccagattcccacagtcataacgattttaccggatgcggcaaagcaggaaattcttgctgggagacttccgattctcaatacagataagttgtttttgaagcggggagaaaagatacatttcatcgacaaagcaattaatttggaagagaaaaaggttaagcaatatcggcattatggacacagcagcccggggttgttcaaaggaacccgatggagttccggccagggaagagcgattgaacacacggaattggttcagcatagaggtattttatacatatcgaatcaacgcattgtgtttcaggcatcggaatggggatttgacaagacatatcgttatttgacagcgattacaccttacagcaatgcctgtgaaatgcagtttggcaataaatcttattgtctgattgtagcggatggaagcattgtgaatcatgtattgcagttgattaaacaaaagagacaggtaccgtaatatagcggaccagaacagaggaggaaaaacgatgctgaacgaccaggagagagaagaattatttagaccaatatgtcaagatatgagtgggtgtttatttgatgcctatagcggcttaaagaatgaaaatacctgcgaacaagaatggctggttaaatgtcgagccaatacggtcttatttacattgtatcatatcgcgagtaaaagatttatttcaccagatggtgctgtttatgaaatgtatctcgttaagaattccacggaagaggaacggtttaagtgggttaagcatattaatgggaaagattcggcagaaaaagaaggcccatttaaagattatattgatggaaaatgtgaaattaatgaggtatttgataagatatcagatgatttttcaaaaggggcaacagaaatttgtgaggaagataacagaaaaagaaatagtgaaactgcaaaaacatattccaagattagcaggattattgcatgcctgagagattatgaaacgtacagtgataaaaaattaaatgaattaaccacagagcttagtgatataatcaatggtctgaatcagaaatccatgataaacagatttatgactttttactgcaaagaaatacagaaagcatatgagcatagagatgttgagcgtcttggtgaattgcaggaggactggagaaagcatcggaattatgtttggagtaagattccggaataagattttggattctgaattcgtaggatgattttgcttaaaagtataaggagataaaggtaatggaaggtcagttaagaaatggaacgcttcttacttcagaaagcgggaatcgatatgaggttgtcagtcttcttggggctggcggtcagggcgaagtttatgatgtacagtgtaatggcagacattatgcattgaagtggtattttaagggaagtgcaacagcacgtcagaaaaatattcttgagacgattatcgcaaaggggtcaccggatgcaagttttctatggcctatggaattgattgttccagctcagggagatttatatggttatattatgccgcttcgtccgaagaattataagagtattgtggacctgatgaagaaaagggtgaatccatctttttatacactttgcagaacagcatttaatctgaccagaggttaccagaagctgcatgcaatgggagcaaaatatcaggatatctcttttggtaatttgttttttaaccctgataatggggacgtgcttatttgtgataacgataatgtctcttttgataatagtaagccgggaggtgttctgggaacacctggatttatggcaccggagattgtgagaggtgagaagcggccatccaaagatacagatagatattcgctttcggtattgttgttttatttgtttatggtgaatcatccgttggaaggcaaacaggaagcaagtatacgatgtatggatatggcagccagagtgaaactgtatggtacaaatcctatttttatatttgacccgaataataagacgaatcgaccggtaaaaggtattcatgataatgcgatgatctattggccattatatcctgaaaaactgcgtcagatgtttaccagggcgtttaccgtgggccttgatgaaccgagtaaacgtattacagagccggagtggatgtcattattttctaatatgatgagtggtatgcttcggtgctcatgcggcgcacagctattttatgatgatgagctggaagaaaaagggatagcccatacatgttggaattgcgggaaaacagttcctgtgccgcataaaatcataatcggcaataacagggtattgctgcagccaaatacgaaattattgcatcatcatgtgtatgatgattttgatatggatgcagttgttggttcactggttcagaatccaaagaatccggcactttggggaattcgaaatgaggaacaggtgaattggacctatcagaaagcagatggtacccagataccggtggcacccggaagaacagcaggaattgcaaagggagtaaagattatcttttcacaatcgacaggtgaattcaaatagcattgatgagaacgagggggataagtttatggaattacaaagaccaggcggagaattagcgacgagaccgattcatttcttttgggcggtggattgctcaggctcgatgtatggagaaaaaataggcattgttaataatacaattcaagagtgtatacctgagatgcgttctgcagcggacaataatctgaatgcgcagcttttagtcagagcactgcaattttcgacaggggcaagttggattacaacaaatcctgttccgatagaagactatggttggcaggatatggaagcagatggattaacggcgcttggaaaagcatttgatcttctggcagcccagctgagtattccaccgatgccggagagagcgctgcctccggtgattgtattgctttcggacggacaaccgacagacgattacaagacggctttggacaagctgaaaaagcttccatggtttagaaaagctgtcaaaattgctatttctattggtcaggatgcagatgatgaagtcttgattgagtttaccggcaataaagagcttgttttgcaggcaaataatgcagcaacacttgcaaaaatgattaaatgggcgtcaacgacagcatcaatggtgtctgcaccgtcaagcaagccaatgaattcgatgcctgctgcggttccggcggtatctgtgcagacttcgacatcttcagcagctgcaatatcagcaagtgatccatttgcaccagccaataatggggcaccattggtactggatatgagcaatatcccggatccggatgactttgatgaaggagctgtttggtaagaaagggaggagtcggatgaaacgatacatatgtgaaggcattgtaaaaggtgcgactcatgtaagaaatcagatgccatgccaggacaataagaaaattattaaaatatctgacgaaataacaattattgcactggcagatggacatggcagttcgaaatgcccgagaagtgacagaggctctatgattgcagtgaattccttttatcatatcatgaagaaatatctggagatctatggggaagatgaagaagacattactcatttgatgacatttcttaatagagaaggtgacgttcgttttgctcaagacgtatgtgaggaatggcaggcaagagttaagcagtcattttataagaataaagtcgaaggtatgacgaatgaagatggaagtatcaaatggccttcggtattttctttatatgggacaacattgttgggaatgttgattacggatagctttgttttctcttttcagattggtgatggggatatcagtgcagtgaccaaggatgctgtagagccattggtagaaccggagaaattccttggtatagaaacacattcattatcaaagtcggatgcctggagaaaagcagttgcatctgtccatcgtttggaactggacagtcaggagccttatatgtatatgctttctacagatggttttgccaacagctatacatcagacaaagaatatcagaagacttgcatagattatctgaaaatgcttcaggaatatggtatagacgttgtacaggcgaatttaaaaaaatggctgacagaaaccagtgaacttggctgtggtgatgatatcacagtggtgatggtatatttttcaaaagagtaggggataagacgttatgattgtagatcgctattattatcaacaattgaataaacaggaacaggcgatttacaaagccttttatcagggggtaatgaaacacaaagcgattattccaattcccattaaaggcactttttcggaaaatgattttagacgtatatttttggcgatgaccagagacaatccactgatttactttttaaatcagtccgcatgcagtttggcaaaagatgggttggggcatatcgctatttgtccacaatattttttttcgcaggaaaaaatcaaagcctataatcgtaaaattgagcaggtggtgaattatcttgtgaaacgattgcgcctgatgcagtgtgatgactatgaaaaagaaatcagggtacataattggatttgtcaaaacattcaatatgattatgaaggaacaaataaacataaaatatccagagttattgcttcacataatatactgggggtatttgcatatcataaggcacaatgtgaaggtattgcaaaggcagttaaagtccttctaaatacagtggatgtgaaatgcatcgttgttacggggaatgctgttaaagacggcgtgtacatactgcatgcatctcttcaaataaagataatcagagtatgtcaatagcagaaaagcgaaaggtagacatcaaagaaataagagaatggttaagtctcattattacacttttatcatttgttcttagcattatgaattcttcatcaacaacaataaataattatgcgcagcaaatcaataactattatgttgtaggtatgggatacgatgcgaaagagttaaatatgactaaatatagaattgttaacagagaatgtagtgtgcggttgaaacatgattttagctcgattgtaattgaaaatcttaatgaaggacaagttgttagaattatagataaatataaaaaatggagacaaattgtttgggtgaatgaaggtggtgaggaatgtatgggatggattcaaaattataaattatctgagtttaaaatacctaaaaataaatggtgattatttgatgaaatcgggagaggttaaaaatggcttggggatatgaaagaggttttgtaattgaacatgataatacattaaaacgaagaatttcttgtaaagattgtaattactatgattcaagtgataaatcatgcatgaaacgaccgttatatttgcctgtggatggatacaattcatggcgttattgtcaatattttgaattggatggcggtgtgagccatttagaagaaaaaagaacacaatatatgcgtgaattaacgaaaagaaaaaaggcacaggaacaacaacagaaaacaataatatcaaaatcaaagccccaaaagactacagttacccatgatgaaccaataaaggcaaaagtcatgacaaaaagattacttaatggtgttacgtttaatgttgtagaaacatatcctaaaggaaagaaattgaatacaaagctaatttcaattattaaatctggaggagtaagaaaaaagattatgctgcggtacgacttggaagagaagaaaatatatgtcagtaataaaacctatacaaaagaagcgattaataaaacatatcaggttttgaatgaaatgattcttgaaaatatgaaaaaggactaaaacaatgcatacgaatcaaaatcacaaaacaaactacagaatcatcacagctctccttctcatcctctgggttgccttcattttcagcaattccatggacaatgcggatgcttccacgttaaagagcggtgcggtgctggcattgcttagacgtattcttggcagtgaaggggcggcccttacggagtttatcgtccgcaagacagcccatttcacggagtttgccattgaaggcgtgctgctgtttttggtggtgaagggttataccacgcggccgctgtggtttctcgggtggcccctgctggccggtttgatgacagctcttacagatgagacaatccaagctcttttcactgggacgatcttctcaggtgacggatgtgtggattgattttgccggagtggtgacgggaactttactggcctttctggtgcaggctattgtccgccgatgcaaaaaatcgtgagatttgcacggcgggctttttttgccgccgtttttatgttaaaatgagcggtagtaaatctgtcgggataagactgacaggaaaatggatgcaagcgaagggattgctaaaagaaacgcttaatagcaggtgttatcgatgtactagatacaggcaatcaaaaggacttaaaacttaataataaaggagaacataaaatatgaacgtgacgatttatacagatggtgcagccagaggcaacccgggacccggtggatacggggctgttcttgaatatattgatccaaagaatcagctgcatgtgaaggagttatcggcgggataccgcagaacgaccaataaccggatggagcttcttggcgtgatcacagccctggaggcattgaaccgcccgtgcaatgtgaccctttactcggattccaagtatgtggtggatgcttttaaccagcactgggtagatggctgggtgagaaagggatggaagcggggcaaaaatgagccggtaaagaacgtggatctctggaagcggcttcttcaggcaaaggcaccccatgcagtaaaatttgtctgggtgaaaggccatgcaggtcatccgcagaatgaacgctgtgatgaactggcgacttatgcagcagacaacggtccgcttttggaggatacaggtgccgagttgtaggcggccggattaggacatttttggaaaatttttttgataaaagaaaatgataaaagcaaagtggctaataggagtcaaaaaaattagagattacaatagcagatgagtaaaatgataagatagaaagtgaactggaggaatacaatgatacaatttccggagaagtttcaggaaagaatgcagcagatgcttggtgatgaagaatatgcggaatttttgaagagctatgatctgcctttccataacggattaagaattaatacagggaaaacaaaaccccaggaactgcttcagcggatgggtgtggatttgaagcaggtaccatggaatgagacaggattttatcttgagaataagaagcagttttccaaacatccttattatcagggaggtctttattatattcaggaggccagtgccatgctgccggcaaagcttgtgaatgcacagcctggggagaagattctggatatgtgcgcggcaccgggaggcaaaagtacggccatcggtgcagccttaaagggtgagggcctgctgatatccaacgatatcagcaagtccagagccaaggcacttctgcgcaatctggagggctttggcattatcaacagtattgttgtcagtgagtatccggagaaattatccagatatttcccggaattctttgataaagtattgattgatgcaccgtgttccggcgaaggcatgttccacaaggaaccttctatgactgagagctggctgagaatgggaccggaggaataccataagtttcagatggagattctgacctatggtgccaaaatggtccgtccgggcggcaaattaatatattctacatgtactttttcaccggaagaggatgagggcagcattgcgtggtttttgcaggaacatccgaatttccatctggtggaagtagacgatgataaggatttatgtggctgtcattgtattgatcatggtcatccggaatgggcagatggcaaccctgaactgacaaagacaagacgtctctggccgcatcatctggagggtgaaggacattttgcggctgtactttgccgtgacgcggacagcgagccgatgggcggcaaagtgactttggcatctgttccaaaactgccggcggagatggagagctttttccagttcctggacacagagggtatccattatccttttgataagaaacgtctgcttgtgcagaatggttatgtgcagtatattccggagggaatgccggagctgaaggggctgcatattatgcgaagcggatggtttttaggagaactcaagaagaagcgttttgaaccaagtggtgcctttgccaggggcctgacaccggatgtctgcgacaaagtgatcgcttatccgggagacagcgaagaagtggtgcgctatttgaaatgcgagacactgcaggtggatccgaatctgaagaacggctggtatctgatctgcgtggatgaatttgccctgggctggggtaaagtttccaatggtacgttgaaaaacaaatacccatccggctggcgtcttgtttaagatgtacttatgcggaaagttttgaattagataagcagcccggaagtttttatgaagctgggttccgcatcggaagagcagcttaggaggtatatatgaagacaagtttcagattggacaagtacctggcggatatgtctgtggggacccgcagtgaagtgaagaatctgatcaaaaaaggactggtgacggtgaatggcgaagtcattagaaagcctgaatataaagtagacattgaaaaggatgatctggtatgccggggagagcctgttgtttatcagacgatggtttattatatgcttaacaagccggcgggggttatttcagccaccaatgatccaaagcagaagacagtgctggatctgatcacggataagtccagaaaggatttgttcccggtggggcgtctggataaggataccgaaggcctcttattgatcaccaatgacggagatctggcccatcagcttttgtcacctaaaaagcatgtggataaggtttaccgtgcgaggattgaagggcaggtaacagcggaagatgcagcgctatttgccaaagggctggagatcgatgatgaagacggtgcctggagggcgatgcctgccaaattgaatattttatcttccgggcctgaatcggaggttgagattatcattcgtgaaggcaaatttcatcagattaagaggatgttcgaggccgtagacaagaaagtggtctatttgaagcgactgtccatgggaagtctgagactggatgagacattggctctgggtgaatatcgtgagctgacagaagatgaagtgcaggcattaaaagaatcgaaaggacatacgaatgatgaagaatgatatagagagactcctggagggaaaagaagccgttatttttgatgtggacggtacactgattgattccatgggggtctgggaagaagtggacagaatttatctgacaagacacggcaaaccgatgtcagaggatttgcagcgcaaactggcggggcttagtattttgcaggctgctgattatttcagaaatgtgatcggcattgatgatccgcctgaaaaaatgctggcggaatggaatgaactggcttttgagcagtatagacatgaaattcagatgaagccgggagccgcaaagtggttgtcactcattgaagagaaagaactgcccatggcagttgcaaccagcaatacaaggaagcttgccatgacagccctgcatgcccaggatattgagcattattttagagtgatcatgacaggtgaagatgtggtaaaaggcaagccggatccttttgtttatcaggaggcagccagacgtcttggtgtgaatccaaagaattgtcttgtatttgaggatattccggagggcatccaggcgggactttctgcaggcatgacggtatgcgctgtacaggatgatttttctgattatcagatagaggaaaagaagaagctggcccattattatatcaattcctttgaggatatttttaataataaagtagaggttctggcatgatgagagaatttcttccgatcagccgggatgacatgaaaaagcgcggctgggatgaactggatttcgtctacgtcattggcgatgcctatgtggaccatccttctttcgggccggctattatcagccgtgtgctggaggcccatggctataaagtgggtattatttcacagccggactggaaaaatgaccagtcagtgatggcacttggtgtgccgagactgggatttcttgtcagtgccggcaatatggattccatggtgaatcattatacggtttcaaagaaaaggcgtcatcaggacgcctttacgccggggggtgtttacggcaaaagaccggactatgcggcggttgtctatggtaatatgatccgccgggcctgcccggataaaccgatcattgtgggcggtattgaggccagccttcgaaggctggggcactatgactactggtccaacaaaatccgaagatccctgcttattgagtcatcggcagatttattattgtatggtatgggtgaacgttcaatcgttgaggtggccgatgcactggatggaggcattgaagcctcggatatcacatggattgccggttctgttttcaagagtaaaacagcagaagattttggtgaagaagctattatgctgccgacatttgatgaaattgccgctgataagcgcaaatatgccgaaagcttttatatccagtatcagaatacagacccattttccggcaagcgaatgattgaaaagtacggggcccgtatgtacgtgatccagaatccgccggccaaacctttaagcgagcaggaaatggacgatgtctatgacctgccttatgtgagagattatcatccgtcttataaagccctcggcggcgtgccggctattgaggaaattaaattcagtctggtgagcaatcggggctgcttcggcggatgcagtttctgtgccctgaccttccatcagggaaggatcatacagaccagaagtcatgaatccattgtaaaagaagcagcagctttgacgaaacgcaaagattttaagggctatatccacgatgtgggcggaccaacggccaatttcaggcatcctgcctgtaaacatcagttaaaacgcggcgcctgtccgaataagcagtgcctgttcccgaaaccgtgttcccagttgcaggcagatcacaaggattatgtgacacttctgcgcaagctccgggcattgccgggaattaagaaggtttttatccgctccggtattcgttttgattatctgctggcagataaggacaaaacattcctgaaagaattgtgtcagtatcatatcagcggtcagctgaaagtggcgccggaacatgtcagtgacgcggtgcttgacaagatgggcaaaccgcatcatgaagtatatgtggattttacaaaacagtataagaagatgaaccagcgtcttggtatggatcagtatctggtgccgtatcttatgtcttctcatccgggatctgaattgaaggatgccgtcactctggctgaatatatccgggatcttgggtatatgccggaacaggtgcaggacttctatccgacaccgtccactttatcgacctgtatgtactatacagggcttgatccacggaccatgacaccggtttacgtgccgaaggatcctcatgagaaagatatgcagcgagccctgatccagtatcgggatccgaagaattatcagttagtaaaagaggcgctgatcaaggcgggaagagaagatttaatcggttttgacagtcgttgtctgataccgcctagaccgatgcagtacggatacggcaaagcaccggcacagaaccgcaatgtaagaacaaacaatgcaaagaacaatagctcacgaaatggcaagttcagcagcaggaacaatagcaggaagcgcacaactgaaaatatatcaagaaacacatctactaatagaaagaaggggtcacagagtgaaaaagctcatcgtcggcacgaatgaaagcggccagcgactggataaatatctggggaaaaccctcagtgaagcaccgaaaagttttatttacaagatgcttcgaaagaaaaacattacattaaatgacaaaaaggcagacggcagcgaaaagttgaatgttggggatacagtcacattctggctgtctgatgaaacttttgataaatttaaaggtgtcgtagagaatatgtcggcaaaacgattgccgaaaccagagattatttatgaagataatcagattattattatgaacaaggcaccgggggtgctgtcccagaaagcggcaccggaggatgtgtccatcaatgaaatgatgatcgggtggctcttggagagcggacagctcacgaaagagatgcttcagacctttcatccgtcggtctgcaatcgactggaccgcaacacaagcggactgatcaccggcggcaagacactggcagctttgcagttcctgtcagagggctttcgtgatcgtaccattcataaatactatttctgtattgtcgcagggaaagttactgagaaggtcagacttcatggatatctgcacaaagatgaggcttccaatcaggtaaccatcacaaaagaagccagacatcaggcggattatattgaaacggaatatgaaccgctggcagaggggaaaaactgtacactgctgaaggtttttctgattacaggccggactcatcagatccgcgcccatctggcaagcgttggacatccgatcattggtgattataaatatggcagcccggagatgaatatggcttttaaaaaggaatacggtatcaaacgtcagctgctgcatgcggctatccttaaaatgccgaaatgtcagtcaccttttgataatttgtccgggaaaatatttaccgcaccgcttcctaaggactttgtacgggtgatgatgggagagggaatctgctttaagaaggagtggatgtcctgatgccaacctggaattccagaggacttcgaggttctctccttgaagagctgatcaaccgaaccaatgaaaaatacagagaacagcatctggcattgatccagaagattccgacgccaatcacgccggtgagaatggatcaggaaacaagaaggattaccctggcctattttgaacatcgtagtacggtggattatatcggtgcagtacaaggtattccggtctgctttgatgccaaggaatgccggacatccaattttccgatacagaatatccatgagcatcaggtggtgtttatgcgggattttgaggctcagggcggtgtggcttttctgattttatactttacgtcagcagacagatatttttatctgccttatgaacaactggctgtcttctggaaccggtcaaaaaccggtcatgccaagcattttaaaatagaagaactggatacgcaatatgaactgacttgtaatggatgttatattcattatctggaggccattcagaaagatcttgatacacgtgagttctaaatttgagggagagaaaatgaccctgaattgggacaggcaaaatgacatcacttgacaattgtggaaaggtatattataattagtttcacgtattatcaaattagcagactaaagcgtttgcggtaaaggagcctattatggatagtttattacatactccggagggtgtcagagacatttataatgaagaatgcagcaagaagaatgcattgtcagccaaacttgacagaattctgaagctgtatggctataaggatatacagacaccgacatttgagtttttcgatattttcaacagagaaagaggatctgtgccgtcacgcaatatgtacaagttcatagacagagacggttctacactggttctgagaccggatatcacaccgtctattgcgagagctgtggccaagtattttaaggaagagacgattcctcttcgtttttcttactgtggcaatacattcatcaacaattcaagcttgcagggcaagatgaaggagacgacccagttgggtgccgagctgatcggagaccgtgacattgaaggggatgcagaagtggtagccctggctattcatctgctgcttgaatcaggtctgacggattttcagctggatatcggccatgtaggaatctttaaggcgttggtggcagaagccgggatggatgaagagacagtcagtcagctgagggtactgatcgagagcaagaactattttggtgtggaagccttagttgagaaattgacgttgtctgatgagactgcaaagcttcttttgaaactgccggaacttttcggttcaggagatattatcgctgaagctcgaagcatgacgtgcaatgctgaggcactcaaagcgttggatgagattgaaaaactgtgtcagctgattgcggaatatggttttgaaaaatacattactattgatttaggcatgttgacagagtatgattattatacagggatgattttcaggggttatacatatggaaccggtgatgcggttgtcaagggtggacgttatgatcatctgatcggtcagtttggcaaggatgcagccagtgtgggttttgccgtcgtgctggatgagctgatgctggcactttccagacagaagattgatattccgacaaatgaagaagcaacgatggtgctttatgaaccggagtatcgcagtacagctatccgcacagccaatgcactgagaaatgttaatcaggcagtcagtatgatgaagaaggagacagataagtctctggatgattataaggcctacagcagacgctatcatattgctcatattttatatgttgaccaggataaggaactgacgaaaatagacatatctgatgattcggtcctgaagatgccggttcctgaattttagagacagaggaaatggaggaagataggatgaagtatttgacatttgctctggctaaaggccgtttggcaaagaaatcgctggcattatttgagcagatcgggatttcaatggatgagatgaaggatcccgatacaagaaaactgatttttgtgaatgaagatttgaagatcaagatgttccttgccaaggcatcagatgtaccgacttatgtggaatatggtgcagcagatatcggtgtggtgggcaaagatacattgttggaagaaggacgccgtttgtacgaagtgctggatctgggattcggtaagtgcagaatgtgtgtctgtggtccgaagtcagcggccgagtatcttcagcatcaggaactgatccgtgtggcgtccaagtacccgaatattgcaaaggattacttttacaacaagaagcatcagaccgtagagatcatcaaactccacggctctgtggaactggcaccgattgttgggctgtctgaagtgattgtggatattgtggagacaggaacaaccctgaaggagaacggactggaagtgcttgaggaaatctgcccgctttcagcaagagttgttgtgaatcaggtcagtatgaagatggagaatgagcggattatgaagctcatcagagatattaaaacggtcatctgagaacggattgagagccgaatagaggaaggttgtatggagcaaacatcagtgggaggcatagaacaatgaagattacaaaagtgacagaagatgcagtggcaacattgctggatgatttattaaagcgaagcccgaataactatacaggttatgcagataaggtacaggcaattattgatgatgtgagagaacgcggagacgaagcactttttgagatgacgaagcggtttgatggtgccgagttaaacgccgacaatatccgtgtgacacaggcagagattgacgaggcgtacacacttgtggatgcatcattgattgaagttatccgcaaagccatgaccaatatccgtgtttaccatgagaagcagcgtcaatacggctggtttgatacgacaccggatggaacgattctcggacagaaggtgacaccacttcagagtacaggtgtttatgtaccgggaggcaaggctgcttatccgtcttctgttttgatgaatgtgattcctgccaaggtagcgggtgttgagaagattgtcatggtgacgcctccgggcaaagacggcaaggtgaatcctggtactttggtggcagctaatgaagccggcgctgatgagatttacaaagtaggcggtgcacaggcgattgcggcgctggcttttggtacagcttctgttcctaaggtagacaagatcgtgggaccgggcaatatttacgtggcgctggccaagaaagccgtttacggctatgtcagcattgattctattgcggggccaagcgagattctcgtgatcgctgatgagacagctaatccgagatatgtggctgcagatcttttgtcacaggctgagcatgatgaactggcttccgctattcttgtgacaaccagtgagaagctggcaggggaagtgcagaaagagattgaaggctttacacaggtgctttccagaaaagccattattgagaagtctctggagaattacggccatatcctgattgcctcatccattgatgaagcagtggagattgctaatgctattgcatcagagcatctggaaattgtcacagccaatcctttcgaagtcatgacaaagatccgcaacgcaggtgcgatttttatcggtgagaacagttccgaacctttgggtgattattttgcaggaccgaaccacatcctgccgacaaacggcacagccaaattcttctcacctctgagtgtggatgattttgtgaagaaatccagcatcatttactattcaagagaagcacttgcagcaaagaaagacgatatcattcagtttgccaaggctgaatcactgacagcacatgccaattccatagctgtacgttttgaggataaatagatggatagaacagcatcaatttcaagaacaacatctgaaacagatatagcagtgacattgaatctggacggctccggtcgttcggatattgatacaggcattggtttttttgaccatatgcttcgaagttttgccaaacacggtttttttgatctgacagtccatgtgaagggtgatctggaagtggattgccatcacaccattgaggacacagggattgtgcttggcgaggctatcaagaaagcactggatgataaaaagggaatccgcagatatggttcttttgcgctgccgatggatgagacacttgttttaacagctctggatctgtcagggcgtccttacctgtgttttgatgctgactttactgttgataaggtcggagaatttgacacagagatggtcagagagtttttctatgcaatttcatacagcagcggcatgaatcttcatattcgtcagctggcagggcagaacaaccatcatatcatcgaagctattttcaaatcttttgcaaaagcactggatgaggcagtaggatatgatcccagaattacagatgttttgtctacaaaaggaacattatagcagatgaggcggcctcacctgctgtgtactgcacagatgtgtgagcaggtcagaataagagaggagtgtggcagtgcgtatatatccggcaattcatatttcagatggcagatgcatcaatgagctgcctgacgggataacaaggggccgtatactgacgtctcaaccgttggaaatggccagaaggtggcaggatcagggagcggaatgtctccatgttgtcgatctggacggtgcggattccggtacttccgtgaatggaacagtgatccgtgagattctggagaatgtccatattcctgtgcaggtcggtggcggtatccgttctatcaaggatattgaccagtatatgaatataggtgtacatcgtgttgtcatcggaactcaggcaattgagaatccggttttaataaaggaagctgtccatctgttcggcagtgataagattctggtatctattgatgcgaaagatgggctgattgccactgaaggacgaaagaaattcagtcattataacgcaacgacagtggcttccaacatgaaggcaatgggaatagaatccgttatttatacggatattctcagaagaggactttataatggtgccggtatcatgcaggcacgggagattgcacagaaactgcatatgaaggtgatctacagcggcggaattgttacccttaaagacatcgaggcattcacagatatgccgatggagggaatcattatcggaagagcgctgtatgaatcccgattaaagctgtccgaagcaatcgaagtgtgcagatggcatgaacgttcaatttgagtcgaggagaatagattatggaagttaagagtatatatccgattatcaatttcagtgatgaggatgagattgctgttcagtatgaacgtctcggtgcagacggtgtgattatcatcagtccggatttttctgatgaggcaatgctgatcaagaaaatcaggaatatctgtgaaaagtcggactgccggttatatatctggcagccatacagaagacttgaggatattaagaaagtgctttatgcaggggcagcaggtgcctggatcgaggcaacagagcagacactgatcagagaagcagcagatcgttttggcgctgacagagtgggaatggtgatcagtgaaccgaagctggcagcggatgaattcaagttggcgaaagaactgaatctgaccaatatttttgtgacaggtaccattgagaagctgccggagacagtaggcaatcagaaagtgatcgcaacctgccgttatgagaacaaggaaggccagaaacatttgctggcagatgccaatgtcagtgcgattgccctgatttatgagaatgaaacagcagcgttgccgaatattcatgccatgaaggcagcccttgagacagacagtgtgaagtttaatcttttcagaagcagtctgccgttttcctcattcaagttaaacgaagatggcctgatccctgtgatcgtacaggatttcagaacagctgagattctcatgatggcctatatgaatgaggaagcctatgagcagacattgcgtgaaggtatgatgacctactggagccgcagccgccaggagttatggcgtaagggggatacaagcggtcattatcagtatgtgaaatcattggacattgactgtgatcgggacacgattcttgccaaagtcgagcagattggtgcggcctgccatacaggtcatcgcagctgtttctacactaatcttgccagcaaggcctatgacggacgcaacccgatgactgtttttgatgatgttatggcaacgattcttgagcgcaaggaaaatccaaaggaaggttcctatacgaattatctttttgatcagggtattgacaagattctcaagaaagtcggagaagaggcagcggagattatcattgcagccaagaatccggattccgatgaagtgaaatatgaaatctgtgattttctgtatcatatgatggttttaatggctgaaagagaagtttcatggaaagatatcacaaaagaactggcggaacgccattaaatgtgttataatcttttcatgtattgaatttagaacacaggaggcggatcgttatgcttacagcatttgcaacatatcttggcaaattcgtattctttattgcagtcgcagcagctggctttacagcaggcaagaagtttaaagcgtcaaaaaaggcgaaaaatagcgcgacagcagaataatcaaattgacaaaggcggtatttgattttataataagaaactggtaggttttgcttaccagttttcttgtgttataggtatttaagcatggcttgaatttgaatctgcaacgcagaaagcagaatttatactgcagtggcgttttagccattacaatgaaaagaaagagcggtttctttagggtgccgctataaacaggaggaataaagatatggaaagaccgtatagtcttaacgaattgaggaagatgtttctggagttctttgagagcaagggccatctggcaatgaagagcttctcgctgattcctcataatgataacagtttactgctgatcaactcaggtatggcaccattgaagccatatttcacaggcgcagagattcctccgcgtcgtcgtgtaactacatgccagaagtgtatccgtacaggcgacctggagaatgttggtaagacagcaagacatggtacattctttgaaatgctgggcaacttctcatttggtgattatttcaagcatgaagctattgcatggtcatgggaatttctgacacaggttgtcggacttgatcctgaccgtctgtatccgtctatttatcaggatgacgatgaggcatttgatatctggaacaaggaaatcggtattgctccggagcgtatcttccgttttggcaaggaagataacttctgggaacatggggcaggtccttgcggtccatgttcagaaatctactatgaccgtggtgagaagtatggctgcggtaaaccgggctgtacggttggctgtgattgtgaccgttatatggaagtatggaacaacgtattttcacagtttaacaatgacggacataatcattatacagatcttatccagaagaatattgatacaggtatgggtcttgaacgtctggctgttgttgtccaggatgtggattctatttttgatgtggatacaattcaggcactgcgcaacaaagtctgcgatctggcaggtgtgaagtatcttgagaagcatgaaacagatgtttctatccgtatcattacagaccatatccgttcagcaacatttatgatctctgatggtattatgccatccaatgaaggccgtggctacgtgctccgtcgtttgatcagacgtgcggcaagacatggaagacttcttggtattgaaggcaagttccttgcaaaactcagtgaaacagtcattgagacatccaaggacggttatccggaactggaagagaagaaggaatttatctttaatgtactgacacaggaagaagataaattcaacaagactatcgatcagggtctcagtattctgaatgagatggaagagaaactgtcagctgaaggcaagaaggtacttgacggtgcagatgcattcaagctttatgatacttatggttttccaatggatctgacaaaggagatccttgaggaaaagggttatgatattgatgaagaaggctttactgtatgtatgcaggagcagcgtcagaaagcaagagatgcccgtaaggtatccaattacatgggtaaggatgccactgtttatgatgaaatcgatccttcagtgacaagcgtgtttgtgggttatgagaagacagagtgtgaatccccaattactgttctgacaacagagacagaattgacagatgccctgacagacggtcagacaggtacgatctttacacaagagacacctttctatgcgacaagcggtggacagatggcagatacaggtgtgatcacaggtcctgaaggtacatttgaggttaaggatgtcgttaaacttctgggcggcaagattggccatatcggtgttgtaacaagcggtatgttcaagaagggcgatgttgtgaagcttgccatcaacaaagagcagcgaagcgacacagccaagaaccacagtgcaactcatttgctgcagaaggcactgagaattgtcctcggttctcatgtagagcaggcaggttcctttaacaatcaggataaactgcgttttgactttacacatttctcagcactgacacaggaagaactggacagagttgaagctatcgtgaacgaagaaatcgccaagggtcttcctgttctgacaaaggttatgaacattgaagatgccaagaagacaggtgctatggcactttttggtgagaaatacagtgatgatgtccgtgttgtatccatgggtgacttctctaaagagctttgcggcggtacacacacagataatacagcttctattgctgccttcaagatcatttccgagacaggtgtcgcagcaggtgtacgtcgtattgaagccctgacaggcaacggcgtatttaagtattacaaggaagttgaaaaggaacttcatgaagctgccaaggctgcaaaatgtgatcctgctcagcttgtaaaacgtattgagggtctgcacgaagaaatcaagacattaacagcggagaataatcagctgaagaataagatggcgaaggatgccatgggcgatgtcatgaatcaggtgaaggatgtgaatggtgtttccttcctgcctgtacatgtcaaagatattgatatgcaggaactgatgaatctgggcgatcagctgaaggctaaacttggtgacggtgttattcttctggcatctgaaaacggcggcaaagtaagccttcttgttatggcaacagacggtgccatgaagaagggcgcacatgccggcaatctgatcaaagcagtggctaagcttgtcggcggcggcggaggtggccgtccgaatatggctcaggcaggcggcaagaatcctgccggtattaatcaggcactggaggctggtgcagaagaacttgcaaaacagcttcattaatggcctatgaaagaagttaagaaattacttgttgttcttgtagcggcagtgttttttatcggacttttcgttctctgtgataagtattcagagaacgtgaaggctgattatgcgtcacagatcaacccatcgattgtgaatcagggcagcagcggtacaggcagtaaggggcagacagtggatgccggccagctgtctgtggagaaaatggttcagaatatggtgacaaaggattattcagcgtcagtgactcttgcagcagcaggagatattctctgtcagcagtctgtacttgagaaggcctacaacagtgattcggaaaaattcgatttttcggatgattttcagtatgtgaaggacttattcctgacatccgattatgcggttgccacgctgaagacaacactggctggcaagtataacggcagttctgatgaatattatggttataccacggaggacagcaattataattctccggaggtgctggcggataatttgaagtctgccggaatttctctggtgaacattgcaacgaatcatgcactggatagtgatgccgcaggccttgtttcaactattggctatcttgatcaggctggtctggtgcatgtgggtgccgcagcgactgctgacggcagtacagattatacacagaatgtcggcggcgttaatataggttttattggatataccaattcctccaatggttattcgttggattctgatgcagaatgtgtgctgaatacattgaatgattatgatgcgcagtctatagagacattatgtaatcgtgtatccgcaatgaaagatgagacggatcttgtggttgtgatgctgaatttcggaagtgtcgaatcagacagcattgaaacagatcagcaggcactggctcagaagctttgtgatgccggtgcagacctgattcttggtacaggttcaagagtgatgaagcctgtggagaagctttcttctgaagatgagacgggtcaaagcacaagaagctgtctggtgctttatggtatgggggcactcctttccggagagacatatgcttccagcgagaaggatacagatatcagtgcagtttttgattttaacatcgctcggaatgcttttggggaaacggtgattcagagttttactgtaacacctgtttatctcaactggtataatgacgcgattcagccgatacctgtctgcgaagccaaggatacggataaatatgcagaaatgctggatgacaatgccatggatagaatcaacagtgcttatgaaggaacgattacccatctgctggatggcagcggtctgacaagtacctacgagaattatgcctatcatgtcagcttacagtaagtatatctgttagttttgagcaattgaatttgaataacactttaaagatgcaatagaagaagacgatgaagtctttggatattgcatctttttgcgtttaggtgcgcaatcgtgtgaaaagcttttgattttctatatattgacaatctattaacatcattgtattgatttgtatgcaatttgtatcattataaatttaaatttgttattttaaaaatgaaatattaagaatttaaatggaaaataataacaaaaaaatttttataaacaaaaaaattttgttaaaaacgagttgcaatttgtttaaaatatgataaaatgaaagtatagtttttgacatattatgaaaattgacgaaataaccatcaatagagcaacaggaaagttgaggattaaggatgtatagtttctttgtaaatggatgtcaggtttcgacatcaaaaaaacaatctcttttgcgcttcctgcgggatgaaatgcacctgacgtctgtcaaggacggatgcagtcagggggcctgcggtgcatgtacagtgcttattgacggagagacctgtaaggcctgtgtgctgcagacagatcgactggaggggcgatcgatcatcactgtagatggtctcagtaaatgggaatcagaggtttacacgtatgcttacggtgaggccggagctgttcagtgcggtttctgtattccgggtatgatcatgtgtaccaagggacttttggaccgcaatccggatccaacggaagaggagattaaatatgcgcttcgcaataactattgccgctgtaccggctatgtgaagattattgccgcggtaaagctggcggcaaagatcatgcgtgccggtaagattccggcggcaggtgcggatgactggctgcttggttcaagggtacacagactggacgtggaggagaaggtgctgggttacggcaaatatccggatgattactatctggatggcatgtgttatggtacggcgctcagaagtaagtatccgagagcaagagttttgtcgattgatacaacagcggcgaaggctctgccgggggttattgatgtttttacggcagcagatattccaggagagaataagatcggccatttgaagcacgatcagtatacaatgatcccggtaggcggattgacgcattatctgggagatgccattgcacttgtggcggcagaggatatggagacggcagagaaggcaaagaagctcattaaggttgaatatgaggtactgccagctgtacataatattcaggaagcggctgcggaaggtgcacctcttgtatttgatgaagagacaaccaatgttcaggcttataaacatgtcagcagaggcaatgcagatgaagccatcagtaaggcggcgcatgtgatttctcatcattttgagacaccatggacggaacatgcttttctggaaccggaatgtgcagtggcttatattgatgatgacggggatgtcatgatcatttctacagaccagtctgcttattgcacattccatgaaagcagtctgatgcttggcacagacaaggtgaagtgccagaatgcccttgtgggcggtggcttcggaggcaaggaagatatgacagttcagcatcttgctgcattgattacttatctgacgagacgtccggtcaaagtccgtctgacaagagcagaatctctgctggtccatccgaaacgtcatcattttgagatggattttaccatgggttgtgatgaagaaggccatattatgggagtcaaggcgaaagtggcttctgatacaggtgcttttgcatcccttggcgggccggtactggaacgtgcctgtacccatgcagcaggtccatacgcctatgagaattttgagatcgagggaagagcttattataccaataatccgccggcgggcgccttcagaggctttggtgtgactcagacgtgctttgccacagagacactgctgaatatgatggcagatgagattggtattacaccttgggagatccgttaccgcaatgccattcgtccgggaggtgttcttccgaatgggcagatcgtagatgaatccacaggtcttgtagagacactggaggctgtgaaggaagaatatgaagccgcgctggctgcaggcaaaccggtgggtatcgcctgtgcgatgaagaatgccggtgtcggtgttggtattcctgactggggtcgtgtgaagctgattgttgaggaggatgcaaagcttcatatttattccggagcctcctgtatcggtcagggacttggaacagtgcttgtgcagatgactgtgacgaatacagatcttacgagagatgatattgtttatgagcgaagcaatacatggatcgcaccggattcagggacgacatccggttcaagacagactatgatcaccggtgaagcctgcaggagagcctgtgagaagctcatggaagcaaagggcagcgataagtcattaaaggatttgatcggtcaggaattctatggggattatcttgcaaagacagatccgctgggggcagatgtgccgaatcctgtttcacatgttgcctatggttatgctacgcaggtttgcattcttaatgagaagacaggcaagatcgaccggatgattgcagcccatgatgtgggcaaggctgtcaatccattgtcctgtgaaggacagattgaaggcggtgtggtgatgtccatcggttatgcggtgcgtgaaaaatatccgattgatgagaactgcaagccgattgaaaaatatggttccattggccttattagagcccatgagataccgaagattgatgccattgtcattgataagccggggttaaatgttgcctgcggtgctatcggtatcggtgagatcacatccataccgactgcgccggctatcacagatgcgtattaccgttatgacggcagcagacgttatgttctgccgattgacaataccccttatgagaggaaggaataaatatggctgttaagaagaaatttccttatcgttcagcattggtggcctgtaatggaggatgtcatgtacaggaaggacagagctgtgaaaatggctgtatcggctgcggcatatgtgtgtcagtctgtccgttccaggcgattgtcatcaatgaaaatggtgtggcacaagtagatgaagcaaaatgtgttgcctgcggcaaatgcgtgcgtgaatgtccgaaacaggtgatccatatccatgaatgtgccaattatattgtggttcgttgttctaaccgacagaatggcaaagaagccagacaggtctgcttggccagctgtatcggctgcggtatctgtgagaagacctgcacagctggtgctatcaaggtaacagagcactgtgcagtgattgatgaatctgtctgtctcagctgtggcatgtgcgtggttaagtgtccgcgtcacgttctgacagatttaagaggaattatctgttagaatcgcatagtgggcggcaaaagcacagatgaagcgcatatgatgaggtttgttggtcggtgtcggcgctgtccatgaaaaaagacggatagagtgataaaaaatagttgacgaattaaaaatttatggtataatgcttttagtgctatgaatatacccacagttgtatcagcacaatacacaactggagggaggtaaggtgtgagctatgtcgaatgtaatcgttaaagaaaacgaaactttagatagtgctttacgcagatttaaaagaaactgcgctaaagccggtatccagcaggaaattcgcaaaagagagcattacgaaaaaccaagcgtaagacgtaagaagaaatcagaggcagctagaaaacgtaagtataaataagctgtagttctcgtattgcagtatgaaagaatcaaagggttgtttccgtttaggaagcaacccttttttcgtaaaagttctgcagatatggcacgtgtacatcgttttcgaagggattgtagccgacaatgaattaagagggaaagttatggaaagagcatttgctatgttggctgaacttctgcagcaggagcagtttgagctgcttatatcggaagaggatcagacggatcacagtgtagagacggatattcgccttgtctatttgatgaatgatgcagtggaaagttttcttgtttttaaagaagcgaaaatgactggtaagtatctgagagactatgagggtatgctggacgcgacactcagcaaagaggaagaaacttatattctgactgtatggcaggatgatcaggcactgacaatcttttttaagcagttggaactggaagtttatctttatgaatatggcgaggttgcgcatttctgggtaccgggatatgaatatctgcgtcttttggagtatcagattgccattttgcgggacaaatatgattaccttggagaaaattactgcacggatattgaaaagaaactggctcagttggcggattttccgcctttaaatgatacatgttatcctgcggtgccggagaaatatctggtaccgagagtcaatgggtggaggccaacaaaggcggcaattgatgtgatgattgaattggctggagaagtcaatgatcgaagcatgatcagaaatttgaaactatacaggaagtgtcatggaaggtggatgacacggaagattgccggaatgctgtgtcagacaatacatcagcagttgattgttctgatttccgaaaaaatgcaggagggaaccagacattactcaaaacgtatttttgatgaaaaaattgaagatgagtttaatcgtcgattaaaaaaggcagtgaagcggcagcagaaattgattgctagcggtatcagagccctggtgtaccgggaagaaccatttacgacagcaaaggacagtctggaatttcatgtttaccttatgattgatgaaaagtgcagaaaaaacaggaaggttcgaattgaagaagtcagatgaaggtgcacttactattacgacaatcagtggtgctttgctgatgtgtgataaagaagcaatagaagtgtaaaaaattttgccgttcctatccggcacttgcgcattgtgtcggataggtcgggcggttattcgggcaagtccaccttgccgccagcatacgggcagcgtcaaaggacgcatgacgaataacaatccggcaataggtatcatgggtatagcggatatgttcttgataggcttcctgttcggtcatggaaactctccctttcttcgattatgggaaagggcggcagcactttttgctgtcgccccttgattacccaccagcaaggacagacagggctgtcaacggtgggcgcagcacattcacttgccgttgactggctcggctgggtttgctatttttgaatggtaattgcagatttaattcttgcgactatatccaatggtgcttattatgagggaaattccaaaaatcaaaattgccgctatccctgtgattagcacatatgaatgaacagaatttaccatagcagccattcccggcccatcttcaaaatattttacaaagtaaaacattggaattaccacaatcaatcccatagtttgcgcagaacgaaaaccaaaccaataagttaatggcaagcaaattcctgtccataataatgggataataattgctgctgcaatcgaaaataaccagataagcatatcaaagttttgaaaaattatgctggataaactattgaatgcaatgcttcccaaaatgctgattgcaacagtatatattacggaaacatatttacttgcaacaacagtaaaattgcttatcggcatagctaattgatattttttccagcttgccttttcatcacttgcgaaactcataatattttgcataccgattgtcatggcaaacataacggaagtaaataagccagcataaattccagcattgaaaataagcagaacaatagctgctgctgcaatcagaataagtttcttatcaatactcttgaagaaaatggatatgtctttatatatcaatcctcgcatgatgtacctcctttaacatagaaaagcataatatcttctaatgtggcattatccacaatgatgtttttgtattttcgtttgaatgcttccttgtcatgaacaagacactccacgctcatatttgtagttcggtgtatgatataatcatcagaggaaagctgtgcaaatttttcttttccgcactttgccacgccataattataaacaagatcatctttctgttcctcgaaaatgatttttccctgatgaattaaaatcacatagtctgcaattttttgtatgtccgaagtaatatgcgacgaaaagaagatagagcaatcttcatcttggataaattcccaaaataggtctaatacttcatcacgcacaacggggtcaagacctgttgttgcttcgtccaaaatcaacagtttaggtctatgtgccatagcacaaatgatagacaacttcattttcatgcctttagaaaatgtgccaatcgttttcttggtcgggattttgaattttttcaagtattgtgaaaaaaggttactatcccatgtcttataaactcctttcaagattttttcaatatctgcggctgtaaacacatcatgaaaattacattcatcaaaaacgacgccaatattttctttgacagttggaattgtatggtctattccaaagacttgtatctgtccgctatctttgcttagttcatttaatatcagattgatagtagtgctttttcctgcaccattctcgccaataaaacctacaatcctgcctttagggactttgaacgaaacattgtccaaagaaaaatcctcgaattgcttgcataaattctgcaccaaaatgttgttatccatgcctgtcacctctcgttattcctcgtaaaatagttttagaatattcgtcatttgctcaagactaatgccatgtgctcgaccaatttctgcgaccttttgtaaaagttcttcagcaattcgtaactgttcctcttgaataaattccctattctgtgatgctacaaaactgccttttccagatacagtttctataaatccatctctcgttaaatcttcatatgctctctgaacggtaataacactgatatgtaaatcttttgctaaagctctcatagaagggagggcttcgccagcagataatgtgccgtccataataaaactttttacttgcatacagatttgttcgtaaataggcttatcactgctattacttatgataatctccacttgctcacctcaccatgtgtacttatcgtaataagcgtacttattcgataagtacaatataggcgatttgtgtgaacctgtcaagagaaaagatgtaaatacattcggaaaagtgagtggctgtctatcaaattcatgtgtgttactttaccgcacatgagcatttatacatggattataagaatgacatttcatttatgatagacagcacattgaattcatatgagcatcagtcaacgtggaatccgaatatgccgcttcgtggattgggatattttgcgcgattatatgaagactatgtccgattgaatgaactgaatatttattctgagacgcgtcttaaactgccaaaacctcagtattttgtcttttacaatggcacaaaggctgaacctgacagacagattctaaaattaagcgattcatttccagatgatggcatacaatcgcatctcgaagttatggtagttgcattgaatattaattatggccataatagagaacttatggagaagtgccggaagatcttagaagaatactaggagagcagaagaattcagcgatactcaggaataagagcgaatgatgtttagctttagcctgagttcggttttttgtatggaaaaagtggaatacctaaaaggattgctgataacagaaacacttgccagaaaaatgattgaatttgaataacaatggtatgtttaacagctgcgtgcataaactgatgtgaggagaatgtggaggcggcaatggtgaaacagcataaacggtttgttcaaaatcaggttcagacacatttttctcaaaaagagaagaaaaagtatcctttatggaagattgccatggcaactttttttcaagtgccggatgagactttggcgaacttgccggttttttatggtgttggcaggcatcggcttcgggtggaaaattattcctctatacaaatatatcaggaggaaaagattgtactgcattgtccgaaaatgtctgtgacgattgtcggaaaagcgcttcagattatctgtttgaatgaggatgaggtgatgatagagggctacatagagcatatagaatatcgttgaaaaaacagtataaagtaaggatattgatgatgacagcaaatataaaggaggcgcatcatgtccgtcgtgtcaaatcaggtgcggtgtcttgtgacaggtgaagaaaccctgcgttttgtgaatctctgtcggaataacggcattgagttgcggcatttggttcggagagaaaatgccatacagatggaaatagatgcagagaattttaaaaagctgagaccattggttcggaaaacacatgttaaaatacatattctgaatcggcatgggccggcttttttcttttacagacataagcggcgatggtggtttttgttgggaatgacggtttttgccggcatgatctatatattgtctctctttgtctggcaaattgatattgacggtaaccgcaaatatacggatgccttgattttacaggcattggcgcagatggatgtgaagaccggatgccgaaaatcagagattgatcttccggaaattgaagaagaattaaggattatgtacaatgaaattacctgggtgtcggccagtatcacgggaacaaaactgcagattgaactgcgggaaggtgatttgaaaatatccggaagttcaggaggcgggcagacaggaaatgtgaagcgtgttgagaatcgagagaataaccccaaaacgcagaatggtgaaagtgagactgatttgccggcaaatttggtggcagatgaagatgcgattattaccaatttggtggtacggcgggggacagttgcagtccgctatggtgatgaagtcaaaaagggtgatgtactgattgaaggaaaagtgtatatttataatgaagatgaaacactgaaaaaagtggattatttgaccgcagaaggagatgttttcggaaaatatcaagaattatatgagaaacattatcagcgaaaacatgaagtgcgcagctatacggggaaaaattatcgagaacttggggtggaaatagtcggaaagagcttttgcctgcctgtatgggagaacattttaaaaaagcaattggaggagaatactttaagtgaagtatggtcctggaagaagcagttcaggctgacaccgactttttatttgccttttgcactggagtatacggagtatgttccttatgaaaatgttgtggaagagtataccgatgaggtcatcaaaaagatggcggaagaggaattgcagaagtatttgaatgaattggagaaaaaaggggttcaaattatctcgaatagtgttacaatatcactagatgctgacggaggtcatgttaagggaacactgattctggatgggccgattggaaaagaagtgcccatcagcagtgagcatatggcatcgacgcggcataatgaatagatggaggattatgcgacaggatgagtattactgaagaaatcattgatatccctgcggaacatatcagaaatgtatttggcgaatttgatcattatatcaaaaatatcgaacgggctttgaatgtgaccattatcgccagaggcggcagcctgaagattattggtgaagctgcaaaaacaaagcgggcagtgaatgtactgaatcaattgattcaattatctgtcaacggagaggttattacagatcagaatgttaattatacgctggcactgagtatggaagataaacaggagaaagtgacggagctttacgatgaactgatctgccataccattggcggacggccgatcaagccgaagacgcatggacagaagaattatattcgcaatatccgtgagaaaatgattgtatttggtgtaggtcccgccggcacgggcaagacatatcttgccatggctatggctattacggcctttaggaataatgaagtcaatcgaatcattttgacaagaccggctattgaggcaggtgaaaaactcggttttttgccgggagatttgcagagcaagattgatccttacttgagacctttatatgatgcgctgtatgagatcatgggagcagaaagtttccagaagaacatggaaaagggattaattgaggtggcgcctcttgcttatatgagagggcgtacccttgataattcgtttattgttttggatgaggcgcagaatacaacaccggctcagatgaagatgttcctgacccgtatcggttttggctccaaggttattgtgacaggtgatttaagccagaaggatctgccaacggggcagcagtctggactggatgtggcactgaaagtgttaggcggcattaatgatattgggatttgtatgctttccagccaggatgttgtgagacatccgctggtacagaagattgtcaaggcttatgatgattatgaagcgaagcagaagcatttgtcaaaagacggtctgaagaaagatgaagcagccagggccagaacaaagcgatcatcagtacgcagaaagataagcgaacgaggagataaataggaggagtttatgacagtaaatattgattatgaagcagataagaagcttgattttgactatgagaagattatcagggaggtcatcaatggtgcccttgattttgaagaatgtccctatgaaacagaagtaaatgtggttttgacaacgaatgatgaaattgcaatgattaacagagactacagagatctgttcaaaccgacagatgtgttgtcatttcctatgattgactatgtacggccgggggatttttcagtattggaggagggattgacagaagatttcttcaacccggagagtggtgaactgatattgggggatattattttgtctgtggacaagattattgagcaggctgcaagttatggccattcccagcagagggaattgggctttcttgtggctcatagtatgctgcatttgttcggatatgaccatatgcaggatgaagagcgggaagtaatggaggagaagcagagagacattttgaatatgctgaatctgaagcgttagtgtatgatcagctggaaaactcagagattggttttggggatagataacatgtgtttggcttgaatacagtgggggattcgactatgaaaaagaagaaatatggtatgacagtcgtttgcatgacaattggaatcatgatgattgcagtatcttgtggtggaaagaagcaagaatcaacagatacagaagttcaaacggcagtagttgttgaaactcaggctatgaatgcaacagaagctgtcaaagaaacggaatcggcattgcctgccggtgaaatgtacagttatttgactggtgaacctgtcagtgagacaatcggaaagcagcgtccgtatgcgattatgatcaataacattgatgtttcgcttccgcaatccggtgtcagtcaagctgagatgatttatgaggcacaggtggaaagcggtattactaggctgatggcagtttttcaggatgtggataacattgagaaaatcggttctattcgtagtgccaggcactattatatcgattttgccaatgataatgatgccatttatgtacattatggacaatcaaagtatgcgctttcacgtattgaggatgataatattatgaccattcatggtttgtctggctatgaatcgaaagttttctatcgctcatccgacagaaaggcaccacataatgtctatacgacaggcaaaatgctggcagaggggcttgaagtcacaggccttaccagagattatccggagggatatacaccgcgactgcagttcaatcatgtcgatacggagctgaaagatggaataaatgcacaaaaagtgaatattccatttgactcggagccatatttcacatataatactgaggatggtctttactatcgttatcaatatggtgaagcacatatcgaccgagagaatgatcagcaacttacatttaagaatattattgttcaatatgtaaacgaaaagtctattagtaatcaggatcaccaggatatgacgttgaatggttctggcaagggactgtatattacagatggcaaagctgaagagattacatggaaaagaaatgataatgcagataagacgaaatactatgatgcatcaggcaatgagatttccttgaatcctggaaaaacattcttcgaggtcgtatcagacagtaaaactgtcactttagaatgatatagacaagaggtgtatgaatgggaagctcttccaaaagcaaaaacaaaggcggcgatatcattgtgcaggggtcgattctggccgctgcacagatcattgtccgtctgattgggctgttctaccgtattccgctccagcgaattgcaggagatgttgcgatggggtattacggctacgcatatgatatttatatgttactgttgcttgtttcgtccaatggtgtgccgctggcagtcagcaagttggtgtcaaagacgcatgccaaacgggattataccaacgaacacagaattatggtcagtgcccttttgtggacactggttgtgggatctgtgatcggtcttggtacatttatttttgcaaaacagattacaagtgctgtatttggccctgagatgattggggtggtgccggcactcagagttctggcaccgacaattttcctctgttgtgttatgagtactttcagaggttattttcagggaatcggcagcatgatgcctacagccatttcacagatttttgaacagatttttaatgcagttgtcagtgtagcagccgcagcaatccttgtatcccagggacctgcatgggccgccatgggcggtaccctcggtacctgtatcggtgcacttgcaagcacgattttcctgattattatatatatgttgtatcgtccacggcttatgcatcgtgtacacaaggataaattgcatcagccggaatcctataagaatatttataaagtgttaacactgacgatggcaccggttgttttgagttctgttatttatcaggtgagcggcatcattgattcttctttatatagtaatattttagctaaacttggctatgatgcagaactgatttcatctttatatggcgtctacagcagcaaatataagatgcttgtgaatgtaccgatggcgatggcaacagcacttggattggccgttgtcccgggtatttcatcagccatgttaaggggtgacagggaagaaattcacagcaaaatagagacaacagttaaattctgtatgattattgcaatcccggcctgtgtaggtttatccgtgcttggcggaccgatcatgcagctgctgtttaatgattcatctgcgctgacaagacatttgattacgatcggtacaccgtatctgttgttttattctttgtcgacggtaacgattggtgcacttcagggaattgacaaaatgaacacaccgattgtgaattcaggtattgctctggcaattcatacggtatttatcgtaattctgctgagattctgtgatatgaatatttacgcaattttatatagtaatattctatttggtttcctgatgtgtatttttaatcaggttgctttaagacgttatatcggttatgaacaggaagcaaaacagacatttctgatacctgcagctgcatcggcggtgatgggcgtagctacatttattgtttataagggtgtttattttgttttacatatcaatgcaattgcaacattgctggcaatcattgtcgcagtggttgtttatgcagtggcattgctgaagttccatggtctgacggaggaagaattatattctttcccgaagggaacaacactgagtgtgtatttaaaacgttttcatttgatataaggagccttgtatgatttacgatgtatgtatcatcggaggaggcgcttccggactggctgcagcgattgcagccgggagggaaggagcctcagttttagttattgaaagaatggataaaaccggcaagaagattctggcaacgggcaatggcaagtgtaatctgaccaatcaggccattcgaaggggctgtatttcctccggcgtttacagatccgggcaggaggtgtttccgcttcatgtactggagaattttgatgccggtgatacactggctttttttgaatccatggggctttatacaaaagcgcgagatggttatgtatacccgatgtctgaacaggccgcatcggtccgggatatattgtgctgggaactggcagagcagaaagccgatgtggtaaccggacaggaagtaaagaagatcagagttggcggtaagggtttgtcgaagggcggttttaccgtttattcggtagacaatgtttatcaatgcagaaaactgatcatggcctgtggcggcgcatctgcatccaaacttggcagcaacggttccggatacagactggcagagtgtcttggacatcatgtgtctgcaccggtgcctgcattatgtgcgcttcattgtaaggagaaatattttaaagaactggcgggaattcgtcttcagggcagggtaagacttcttacaggcggcaaaatggccgcggaggacagcggtgaaatccaattgactgcgtatggtatttcaggaattccggtgtttcaggtgagccgttacgccgcgaaagctttgcaaatgaaaaaaacagtgacagcggtacttgatttgatgccagctgtcagcgacaaaggacttcgtgccagactgatgtggcagatgcatgccagtccgaagtggacaatgcggatggtgctttcgggaatgatgaatagtaagctggcagcctgtctgttaaaatgcgctggcatagacggcggacagccatgctgcaaagtagatgatcgtgcactggagcgtttgattgcactggtgaaacatcacgaagtgcatattaacgcgacaaacgattttgaacagtcccaggcaacagccggaggggttgatacaagagaaatagaagagaagaatatggcatcaaaaattgtcagaggactttattttaccggagaattattggatgttgatggcatctgcggaggatacaatctgcagtgggcctgggcaaccggtattcttgcaggttcagatgccggaaggagctgccgtgttaaaggttaatcagattaaactgcctctgaaccattcaaaaaaccaattaaaagaggcgattgtgcataaattgcgtatcagaccggaggagatgatagattaccggattctcaaacaatcaatcgatgcgagaaaatccggaaaaagcgggcatgccggggaagttctttatcagtattccgtggcagtgacattagcaaatgaaaagcagtatctgaaaaagcatcatgccaataaagatatactgccttatacaccggtcatctatcagatgccggaaaaggcagcggacaaaccagcaaagcctccggtaatcatcggcagcggaccggccggcctgttctgtgggctcatgctggccagacagggatatgatccgattattctggagcggggaagtgaagtgcacacccgtatggagaaggtgaatgccttctgggcaggcggtaagcttgataaggagtgcaatgtacagtttggtgagggcggtgccggtactttttcagatggcaagctcaatactcttgtcaaggatccttttggacgacagagaaaggttatggagacttttgtagaggcgggagcaccggaagatatcttatatgtgcagaagccgcatgtggggacagatctgcttgtagggattgttgaaagacttcgcaatgagatactttctctgggcggtcaggtgcactttgattcaaaagtgacagattttgtgatagatgctcagaatcatattagaggtgttattgtcaatgaccgtgagaaaattgaagctgaccaggttgttctggcagtgggacatagtgccagggatacttttgagaaacttttggagagaaagattaccatggagccaaagccgtttgctgtcggtgtgcgcgtggagcatccgcagtcaatgatcaatgcatcccagtatggcagcgtagcagaccagcttccggcagccagttacaaattaacttaccggacgggtaaggggcgccaggtgtatacattctgtatgtgtcccggcggctatgtggtgaatgcttcttcagaagaaggcatgtgtgcggtgaatggtatgagcaaccgtggacgtgacggtgccaatgccaacagtgcggtgatcgtgggcgtatctccggaggatttcggcagttctgatattcttgccgggatggcttttcagcgaaaatgggagaaactggcttatgaagaaggtcagggacttgtgccagtgcagcttttcgatgatttcaaagaaaaaaaagtctcagaacgttttggagcggtgaagcccgaacataaaggcggttatcatttcggcaatttatggcattgcctgccgacgtttgtctgtgaaagtctggtagaaggcattgatgctttcggcagaaagatcaaaggttatgacagacccgatgctattctttcaggtgttgaaacgcgaacatcttcaccggtgcgaataccgagagatgaacattttgaaagcagtgttgggggcctttacccatgcggtgagggagccggttatgcaggcggcattacaagtgctgctatggatggcctgcgtgtagcggaagctgtagcagcggcttatgccgccgttaaacaggcaaagtagaaatgtttgtcagaaacagagaaataattgtttggggacaatgacagagagagaatggaggcagacatgctgattacgaataaacattacagacagaatctgaaaaacaaaaagagaattgtcattaaagtgggatcgtcctcgcttgtgcacccggaaactggagagacagatctgctgaaactggagcagttggtgcgagtcctgtgtgatctgcgcaatcagggcaaggatgtggtacttgtttcatccggtgccattggtgtagggagaaaagcccttggtttaaacgagcgtccgaaggaactggctcagaaacaggcctgtgcttcagtgggacagggaatgctgatgatgatttatcagaagctttttaatgaatacagccatgtggcttcccagattcttatgacgaaacatactattgtcagagaaaagagcctgcacaatgccagaaatacatttaatgaattgctgagaatgggagttattccgattgtcaacgagaacgataccgtttcaacggatgagattgagattggtgacaatgataccctgtctgcggtagtggcagccattaccggtgcagatttgctgattttgttgtcggatattgatggcttgtatacagatgatccgtctcagaataaggatgcgctttttattgaatgtgtgacggatattgatgattctctttacgagattgccaaaggagccggcagcgattacggtaccggcggcatgaaaacaaaaattgacgcggcacgtattgccaatgatgcaggatgtgatatgattatagcaaacggcaaagattttcatgtcattgacgacattatgaaaggacaggagaagggtactttattcctggctcataagagtgagaagtttaacattctggattatatagaacctgaaaaaattatcaacggaggagaagaagaaattcatgattacagatgctgatattaaaagaattaatgaattataccataaaagtaaaagtgaagggctgacaccggatgaaaagcaggaacaggtgaaattaagagagtcttatatcgaatctgtccgtgccaatatgagaagacagctgaacaatattgatgtaaaaagaccggatggaagtattgtatccttgaaggagcaggcagcacagaatctggctaagaagaaaaaacatgccaactgatatctgtgaggcaaagagaatgctgcgaaaggaaattctttcaaagagacggcatcttggcgaagaaatatgccagacattcggcagacagttcgcagagcgaatcgtcggtctggatgaatataaagcggcagatacgattttatgctatgcttcctgcaaaggggaggcggacacctggaagctgatagaaaaagctttggaggacggcaaaagagtagcattgcctagagtcacaggtccggcagaaatgcatttttataaaattacatctatgaaggatgtggcaccgggatattatgatattcctgaaccgctggaaaactgtcaggaggaagtatttgaagggtttctggttgttcccgggacagcttttgacagacagatgcaccggatgggctatggcggcggtttttatgatgtgtggctgaaacgtcatggcagtcatgtgacagcctgtgggttggcctatgattttcagttaaggaatgaaataccttttgaaaggcatgacagaatgatgaatatagtgataacaccggatgaggtgatacggaaaggagatgcggcagatgacaacgattgaggaacttggcagaagggccaaacaggcatcaagacatatgaacagaatggggacaacacagaagaatcagattctggccttggcagcacaggcgctggtggatgagcaggaagagattttgaatgccaatgccatggatatagaggcggcaagaaagaaaaacatgccggagccgatggtggatcgcctggttttatcagaaagccgcattgccggtatggcagagggactgacacagctgattgccctggaagacccgattggtgaaatcatcagttctaccgttcgtccaaatggtcttgaaatctgcaaaaagagagtgcctatcggcgtcataggaattatttatgagtccagaccaaatgtgacagcggatgcctttggcttatgttttaagacaaataataccgtgattttaaagggtggcagtgatgccattcattctaatatggccattacaaaagtattgagaaaagctattgccgcagggggcggatgtgaagatgcccttctgttggtggaagacacaagccgtgaaacagcaaaagccatgatgcgcctgaaccagtatattgatgtactgattccaaggggcggtgcaggattgattcgtaccgttgtggagaacagcacagtgccggtgattgaaaccggaacaggcaattgtcatgtttatgtggatgcttctgcggatattgacatggcggtaaagattattctgaatgcaaagacccagagaacaggtgtctgcaatgcctgtgaatcactggtgattcataaagacattatcggagaggcgcttccggctattgcaaaggctctgagagagaagcactgcgagcttcgcggtgatgaggcagcccttgaagtggtgccggatatgaagaaagcaacagaggaagactggggaactgaatacctggatctgattgcttctgtgcgtaccgttgcttctgtggatgaagccattgagcatatcaaccgctacaataccggccattctgaggccattgtgacaaaagattacgccaatgcgagaaaattcctggatgaggtggatgctgcagtggtttacgtcaatgcatcaacccgttttacagatggatttgaatttggttttggtgccgaaatcggcatcagcacacaaaaacttcatgccagagggccgatggggttaaaagaactgaccactaccaagtatgtgatttatggggatggccagattcgggaataaatatctcaatctttgattgggataaactggaggatatgaatgagcattaatgattatacaaaaacagagggtgtgtcacagctgccttctgatgaaactgagaaacagctgtttatcatcgagcagttacatgaacagatgcaggcggattatgccagaacagggaagaaaaagacctatcatgtggtgactttcggctgtcagatgaatgccagggactcagagaaactggcgggcattttggaacgcatcggttatacagaaacagatacggaggatgcggattttgtcatttacaatacctgtacggtacgtgaaaatgccaatcttcgtgtttacggccgcttgggacagatgaagcgtactaagcagcgccatccggatatgctgatcgcattgtgcggctgcatgatgcaggagccccttgttgttgacaagattcgtaaatcttaccgtcatgtggatattattttcggtacacacaatatctttaaattggcagagttgattcagacacgtttgaataccggcaaaatggtggtagatatctggaaagataccaatcagattgtggaggatctgccgaatgaacgcaagtactctttcaaaacaggtgtcaatatcatgtttggctgcaacaatttctgcagttattgtattgtcccttatgtgcgtggtcgtgagagaagccgtgaaccgaaggatattatccgtgagattgagcgtgacgtagcagatggcgtgaaggaagtcatgctccttggacagaatgtcaattcctacggtaagaatctggaaaacccaatcagctttgccaagttgcttcaggaaatcgagaagattgaaggactggaacgtattcgttttatgacttctcatccgaaggatttgtctgatgaactgattgctgttatggggcagtcaaagaaaatctgccgtcatcttcatctgccgctgcagtcaggcagcagtcgtattctaaagttgatgaaccgtaaatataccaaagaatcatatcttgacctggtggaccgcatccgtaaaggctgcccggatatttctttgacaacagatattattgtgggctttccgggagaaacagaagaggatttcttagagaccatggatgtggtggagaaagttggatttgacagtgcctttactttcatttattctaaaagaacaggcaccccggcggcttctatggagaatcaggtgccggaagatgttgtcaaggatcgttttgatcgtctgttaaagctcgtacagcagaaggcctctgaagcttctgcacgttttactggctccgtacagaaagtgcttgtggaagatgtgaatgagcatgacgaaaccatggtaacaggccgtatgagcaataatctgctggtacatttcaaaggaacaccggatttgattggtcagatagtggatgttcatctggaagagtgcaaaggtttttattatattggtaatttgtcagaataataaacaaaatcgtgaaaaaagaaaaataattggtgaacttttacaaaagaaaaaataatcataaaaaatagttgtattttccagattttgtgatatgatgaatgagaagttaagtttgaagagcaaaggcgttctcatttatttgaggacgcctttttactttaccggggttcaggtgctatttttagcacagcggttagtcagaagtgagagatgacgaataccgtatagctccggaacaagcaaataatattgaaatgaggtaggaactatgtcagtaaaaatcaatgtatcagagatttttgcatctaacgtatttgatgatgcgacaatgaaacagcgtttaccaaagaagatttatgctgaattcaagaatacacttcttgaaggcaaggaccttgaaccacatgtggctgagattatcgcccatgagatgaaagagtgggccattgaaaaaggtgccacacattatacacactggttccagcctttgaccaatattacggctgagaagcatgatgcgttcattaatccgcagaaagacggctctattcttctttctttctcaggaaaagagctgatcaagggtgaaccggatggttcttcattcccttcaggtggtatccgtgcaacatgtgaagcaaggggttatacagcatgggattgtacatcaccggctttcattcatgaagctccggacagcacaccggttctttatattccgactattttctgttcttacacaggtgaagcactggataagaagacaccgcttcttcgttccatggaagcactgagcacacaggctatgcgtattatcaaactctttggtgatacaacagcaacaaaggttgtaacaagtgtcggacctgaacaggaatacttccttgtagacaaggatacatatgacaaacgtaaagacttgatcttcacaggccgtacattattcggcgcacctgctcctaagggtcaggaactggatgatcattactttggtacaatcaaagagagagtccttgcttatatgacagagttaaatgaagaactctggaaattgggtattacagcaaagacacagcataatgaagttgcacctgctcagcatgaactggcaccgatttatgatacaaccaatattgccacagaccacaatcagctgattatggaaattatgaagaaagttgcacttcgccataatcttgtatgcctgttacatgagaaaccatttgcaggtatcaatggttccggtaaacacaataactggtctatgagcacagatacaggcaagaatctgctggagcctggtgatacaccacattccaacaagcagttccttcttgtattggcatctatcctgaaagctgttgatgattatgcaccattgcttcgtatgtccgcagcaattcctggcaatgaccacagacttggtgctaatgaagcacctccagcaatcatctccgtattccttggcgatcagctggaagatgtattaagccagttatgtgaaaaaggcgaagctacaagaagtctggaaggcagccagcttgaaacaggtgtatccactgtaccaagattcagcaaagatgctacagaccgtaacagaacatcaccatttgcatttacaggcaataaattcgaattccgtatggtaggttcttctgcgtccatcgcagaccctaacattgtattaaatacaattgttgcagagacattatgtcaggcagcagatattcttgaaaaggccgatgattttgaactggctctccatgatctgatcaaggactgggtaactgaccatatccgtatcatctttaatggtgatggttattcagatgcatgggtagaggaagctgcccgccgtggccttccaaacatcaagaatacagtagatgctacatctgtactggcagatccagaagtcatcaaacttttcgagaaacatggcgtattctcagcagtagagcttgcagcccgtgaagaagttggttacgagaattattctaaggctatcaatatcgaagcaagaaccatgatcgatatggttaagaaagaaatcattcctgctgttatggaatatacaacaactgttgcaaaatctgttgcagctgttaaggctgttggcgcagatgcttctgtacaggaaaaggttctgaaagagattacaacagagctgtccaaactggatgcatctgttgttaaactggaagcagcaacagatgcttctgttaagattgaagatcctaaggctcaggctattgcatacagagacgatgtattcgctcagtttgcagaagtacgtgaaccggctgataaactggaaacactggttgatgagaaagcttggccattcccaacatatgcagaactgctgttcaacgtctaaaaaagagacggagcattcgcgctaagtagttagtaaagtgcggttttagattatcgataaaaggattccctatgatctgttcagcacaggcacactcgcgttgcccaacactggcagcggtacataagacactaaaggacagtgcctaagtaccggccgtgttggaagcacctgtgctgaacagatgcatagggaatccttttttgaagtttatagactgcactttgaaaaatatatgagcgcgaacgctcctgatagagataagatttcttaaggctttttgggaggggagtcatttggactacaataaatgatagtatgggcagatgtaatgaaatatgctcttataaatttacaagccaaacctggctattacaaaaaagacagcggcaatgatgaatgatacaacaattcgcagcatggaatagctgtataatttttccggagtgaatttgtcataacgtacggttactgtggagccgatttgtgaggacataggcacttgtatgcggttatgggactgatagattctgccctttactttgtaggaaacaaccgcccattttgaattgcgaaactttgatgtttcaggacctggtgttttaatggatataatggttccgacggtttgcgccgttttgttgtaattcaaaagaaattgaaggatattgaacaggcaaaagcacagggcggctgcgctgatcatatagagaaaaattttttcgttattcatattttaaactctctttcatgctaaatcagttctgttataaaattttatggacaaagcagcagatactgccagaatcatacaggaaagcaacaagacacttccgcaaataaggattggggaaaattcggaaagaaagttcaggttgaaattttccattttcatgagctgaggcaggaggaaaggcgaagctatgatgacaactgtaaaggcaaatttggttttctcgtaacccagcttatactgtattggaagatagatactgatcaatacagaggtgactaaaaacatcaggaagaacatggctgcattcatagtgtctaaaccggggataatcaaagcttcaatggtatagatggtgcagcagaccacataaacggcaatacagaaaatgtacagggacaataccatcatttttcgtgaaaaagttgctgcgcatagcagagaggctgcctttggaaattgatattcttttaaagagatatattgcagcaggattaaaacgcaaaaaatgacagacagcatgaagcccagaatcccggcatattcagggacacgtcagagcataaaaggcgggataagtaccgcagcagccagcataatcagtacatactttttgataatcaggatatctttctttaataaataccatagcatcattttccacaacctcctaaattggccagcataatatcttcaatggtggggcgttctgtgagggcatccggaagatacggctgtactctggcagcatgtctagtgacgccggtaaaaccaaatgcagtttctgtgatgtttaaaaatagctggcgtatattctcagttaataattttttatcacctttgatgattctgtaattgtcaaggagaaaatccttctcttcctgaaagacgatgcggccattgtgaatcataatcagcatatcagcgattttgtcaaggtccgaagtgatgtgggttgagaaaagtacacctttgccgccgttttccatataatcattcagaacattcaagagctggcttctgcttagagggtccagtccgctggtgggttcatccataatcagaagttcagcattgtgagaaagggccagagtaagggcgtatttcatcttcattcctttggaaagggtattgattttccttttagggtcaagggaaaacatatccatatagtgtttaaaatcctgttcagaccagtcggtataggcagatgcgagaatacttttcatctcggccatagacaattcttcataaaaacagccgtcatccaatacgacgccgatgcgatttttaatctgttgttcatttctatccatatcaaggccaaaaaactgaatattgccggaatcctttttcgccaggttaagaattgtgcgcaaggtagtagtctttccggcaccgttaattccgataaaaccggtgatgcagccctccgataaagaaaatgagacgtctgtcagtgaaaaatttttatacgatttgtttaaattctttactctcaaaatatctttcattgttaatcctcctcgtaaagaatatccatcatggcattcagttctcctttagtaattttcagtgatttcgcagtttgtatcatatcgagcattttctgctctacaagacgccgtttggaatcccgcagtaattcaagattgccggcagatacaaaggtgccgatgccgacctgacttgtaataaacccttcatgttccagttcctcgtaaacccggcgaatggtcaaaacgctgactttcaggtcattggcaaatgcacggatagaaggaagtgcatcaccctccactaattcttcctttaaaatagcgtctttaatctggtctttgatttgctggtacaaagggctgtcagaagtatttgaaataagaatcttcaagtttgttcttcatcctttctactagtgtgctgtttgcatatacacattataaacattaagcacataaatgtcaataggagtgtggaaattcagtattaggtgtattataatgggagtataaactttgcacaggaattgggatgcggaatgtgttgaatgtgtttatagtctgcgaagcagactggatgccgcgccaggggatgcaagggagtcttgaaaaatttacagatagagaaagaaaggaattaaaagtatgggaataaaatatacgtcattgacaaaaaaagccatgatgatttgctttgagacacataaaaatcaaaaagataaaagcggcatgccctatgtttttcatccatttcatctggcagaacagatggagacagaggatgaaatctgtacagcgctgctgcatgatgtggcagaggattcagactgtacaatagaagatttgaaaaaggaaggcttttcagcggacacgatagaagccttgcggctgttgacccatgaaaaatctgtaccatatatggattacattgcggcacttaaaggaaatccgattgccagaaaggtgaagctggcagatctggtacataacagcgatatcgggagactggctatcgtgacggataaagacctgaaaaggacggaaaagtatcagaaagcgagaaatttgcttttagaagagtaataatcggtgcttgtgattaaattcgatatatgctaaaatgtagaatgcaaaaaaagacgaattgaccgatgaagaaactcggaggagaaatatatggcagcattgacaccgatgatgcagcaatacatggcgatcaaggagcagtataaagactgcatccttttttatcgtctgggcgatttttatgaaatgttttatgatgatgccctgactgcatccagagaacttgagataacactgacaggcaaaaactgcggtcaggaagagcgggcaccaatgtgtggtgtcccttatcatgccgtggatgtttatttgaacaaattggttgcaaagggctacaaggttgcaatctgtgagcaggcggaggatccgaagcaggcgaaaggcattgtgaagcgtgaagtgatccggattgtcacaccgggaacgaatctgagccagcaggccctggatgagggccgcaataactatctgatgtgtcttgtatatgacaataatcagttcggattggcaatcacggatatttcaaccggcgatttttatacaacggaagtggcaacactgaaggaactttatgatgaaatccatcgtttttcaccatcagaaattatctgcaacgattctttctatatgagtggggccagtctggatgatttcaaagaccgtctgcatgtttctgtatccacactggatacgtggtatatggatgaggcggtgagtgttcagaagatcaaagagcattttagggtggccagccttgacggtcttggcttgacagattttccatctgggacattggctgtgggcgcattgctattatatctttatgagacacagaagaatactcttgacaatctgaccaagattacaccgtaccgctcaggtggatatatgatcattgacagtgccactaacaggaatcttgaattgattgagaccctgagggaaaagcaaaaaaagggctcattgctgtgggtgctggataagacaaagacggccatgggtgcccgtctgatgcgaaactggattgagcagccactgattgagaagaagaagattaccgcaaggcaggatgcggtggaagaattatataatgatatgattaccagagaggagatacgggaatatctgaatgcggtatacgatctggaacgtctggtgactcgtatcagttacagaacggcgaatccccgggatctgattgcttttaagacatctctcggaatgattcctcctgtcaaacagctgctttctcaggcaaaaagcgcagaattgaaagaaattgatgaaagaatggattgtctggaggatatttatgatctgattgaaaaatctattcaggatgagccaccgattatgattcgtgagggcggcatgatcaaagagggttataatgaagacgtggataagttccgtctctcaagaacagaaggcaaaacctggctggcggagctggaggctcgtgagaaggagaaaaccggcatcaagaatctgcgtgtgcgctataacaaagtttttggctattatctggaagttaccaattcctataaggagctggtgccggaggactggactcgcaaacagacactggccaatgcagagcgttatattacgccggaattaaaagagctggaagatatgatccttggtgcagaggataagcttgctgcccttgagtatgatctctattgtgaagtcagggacagtattggtgagcaggtcgttcgtattcaggagacagctaaggcaatcgcgcatttggatgtattggcttctcttgcctgtgtggctcagagcaatgattacgtgcgcccgtctattaacacaaagggcgttattgatattcagggcggccgccatccggtagtagagaagatgaacaacaatcagatgtttatcgacaacgatacttatttggacaacaagaaccatcgtatatctattattaccggtccgaatatggctggtaagtctacctatatgcgccagtcggcgctgatcgtgctcatggctcagatcggaagctttgtaccggcaaaatcagccaatatcggcattgtggatagaattttcacccgtgtcggtgcatcagatgatctggccagtggacagagtacttttatggtggagatgacggaagttgccaatattcttcgcaatgccaccagccgaagtctgctgatcctggatgaaatcggaagaggtaccagtacatttgatggtttaagtattgcctgggcggtagtagaacatatcagcaatccgaagcttctgggggcaaagacattgtttgctacccattatcatgaactgacagaactggaaggaaagcttgacagcgtgaacaattactgtattgccgtcagagagcagggggatgatatcattttcctgagaaagattatccgcggcggtgcagataagagttatggtattcaggtagcccgtctggcaggggtacctgattctgtcattgacagagcaaaagagatttccagctggctggaagaaacagatgttactgacaaggcgaaaaatctgcaggtgagaacttctgctaagaaaaaagaagtggtcagagaggcagttcctgctgaaaaacagatgagcctttttgatatttacccggcagaccacccggttctgaaggaactggcaggactggatgtgtccaacatgacaccgattcaggcactgaatacattatatgaacttcagaaaaggttaaaagagacaaattagccatcaaatggtcacaaaatactgatatactattcatttgggataaaataaacaggagagggggcagcaggatgaagtctattcatttactggacagtgataccatcaacaagattgcagccggagaggttgtggagagaccgtcctcggtgattaaagaacttgtggagaatgctattgatgcgaaagcatcggcaattacgattgagattaaagagggcggcattgccatgatgcgtgtgacggataatggcggcggtattgacagagatgatatcaagacggcgtttgtcagacatgccacaagtaagattgaaacggctatggatctgatgacagtgggatcactggggttcagaggagaggctttgtcaagtattgcctccgtttctcagattgagctgatcacaaaggtacaccgggaattattgggggttcgttactgtattgacggtggtgaagaaaagagctgtgatgatatcggatgcccggacggcaccacgatcattgtgagaaatctgttctataatacaccggccaggagaaagtttttaaagacggcagccacggaggcggcctatattaatgatctggcaggacgactggcattgtcccatccagatgtatcctttaagtttattaacaataatcagaatcggcttcatacctccggcaacggcaatctgagagatatcatttatcagatttacggacgggatgtggcaggacagctactggaagtggatgttcagggcaaactctgtcatgtgacaggatttatcggcaagccgattttatccaggggtaatcgttcctgggagaattattttattaacggccgttatatcaagagcaatattattacaaaggcgatagaggatgcttataagacatttgtcatgattcacaaatatccttttacggcctttcatattgaagttgatccggcactgatcgatgtcaatgtgcatccgagaaaaatggaattgcggtttaatcagaatgaggctgtatatcaggaaatttatgatattatccgtgcagtgctggaacaccgggagctgataccggccatttctctggaagaccagaaaaaggcgaacgggaaagaaaaagaaaaggaatctggtccggaaccttttgagctgcagcgcttggctgctatgggtgccggacagaagaaaccggagcagtcatcatcggcatattcaaagtcgggacattctgtaccaacaggtttttcagctaaatcatcggtggcagcaggcagtggctattcggcggcatcttatccgaatcagggtgctgacagcaaaccatatactgcaccgacaggacaatcaggaagtgcatttgtgcgggaaacaccgacggcatatcatcataaagagacgatgacacaaagtacttcgaaattgcaggatgaaaataatagggcagtgatgtctgaaactacggaagaacagaagaaaacagaagtgacgctgtctgaagcagcagagaaagcaccgaagccgcatatgccgattgttggagaacagatgcagctttttggtgaggatgaaaggcttctggatgagaaagcaagagcacggcatcgtttgatcggacaggtttttgatacctactggatggtagaatatgatggcaagctttttattattgatcagcatgcggcccatgagaaggtactatatgagaagttgatgaaagctttttcacagaaagcacttcaaaagcagatgttgtcaccgccggttatactgacattgtctatgcaggaagagaatatttataagcagtatgcagattattttgcggaacttggatttgaaatagaattatttggcggcagagagtatgcagtgcgcggtgtgccactgcagctctttggtatgaatgccagagatatttttattgaagttttagacagtgtgacggaggagagccgcagattggatggaagtgctattacggatcatattgcaacgatggcctgcaaggcggcggttaaaggtaataataagttgtctttcaaagaggcggataccctgatcgaacaacttttgcaggcaaagaacccgtatacatgtccccatggccggccgacgattatttcactttcaaagtacgaactggagaagaaatttaaacgaattcaatcatagaatgggagaatgaaacatgaaacagccactcattgtactgaccggaccgacagcttccgggaagacagcactttccattggacttgccaaagcaattggcggtgagattatttctgcggattctatgcaggtttaccggcagatggatatcggcacagccaagatccgtccggaggagatggagggaataccccattaccttgtggatgtgctggaaccagatgcatcttttaatgttgttatttttcagcagatggccagggaggccatggccaggatcagagccaatggccatgttccgataattgtcggcggcacaggcttttatattcaggcgattctgaatgatattgatttcaaagagaatgaagatgacggttatcgcacgcagttggaagagatggcagctaaggaggacggtccgaaaaaactttatgagatgctgaagaaagtggatccggaatcagcagagaagattcatggtcataatacaaagagagtcattcgggcgctggagtatttccaccagacaggtcagaagatttccgaacataatgagcaggaagcgcagaaagaatcaccctataactttgcctattttgttttgaaccggccaagggagatcctgtatgaccggattgacaagagagtggatcaaatgatggaggaaggccttgtcgaagaagttcggagtttaaaagaacatggatacgatagaagtcttgtctctatgcagggattgggatataaggagatattagcttatcttgatggggagataacccttgaggaagccgtttatatattaaaacgggatacgagacattttgccaaaaggcagctgacctggtttaagagagaacgggaagtgctgtggatagatcagtcacaatatgacgggaaagaggctatactgacagatatgatacatatccttcgtcaaaaaggcataatagacggatcttgtatcatataataggaaagacagcatcaggatctgtaaacaggttccgaagatgcgttattatattaaggagaaaacaatgacaaacgataagatagaatatgaattaaaaggactgtatgaacatctgcatttggatgaagatgtgtatgattactgcagcaagattgagaaatcattaaaagaacgttttgaggcaattgatcaggttgctgaatacaatcagctgaaggttattcatgctatgcagaagaacagagtcagtgaaagacattttgcaggcacaacaggttatgggtatgatgatgacggacgagatacccttgagaaagtatatgcagatatttttcatacagaggatgcccttgtgcgcccgcacattacctgtggtacccatgcattaacggttgctttatccggcaatctcagaccgggggatgaacttttatcacctgtgggcaaaccatatgatacgctggaaggcgtcattggtatccgcccggaagtgggttctctggcagaatacggagtggcttaccgtcaggtagaacttctggaggatggttcttttgattatccggccattgaaaaagccatcaatgagaaaacaaaactggtaacgatccagcgatcaaaagggtatctgccgcgtccgacgttctctgtacagcagattggtgaactgatcagctttgttaagaagatcaaaccggatgtgatctgtatggttgataattgttacggagaatttgtagagacgattgaaccatcggatgtgggcgcggatatgtgtgtcggctctctgatcaaaaatccaggcggtggccttgcgccaagtggcggctatattgtcggacgcaaagattgtgtggaaagagctgcgtacagattgacagcaccggggcttggaaaagagttaggtgcgaatctgggcgtgaaccgggcactgtatcagggacttttcctggcacctcaggtaacggcttcagctttgaaatccgctatttttgcagcgaatatttacgaaagtctcggatttaaagtggttccaaacagcacagaatccagacatgatattattcaggctgttgtaccgggaacggcagaaggcgtgatcgcgttctgtaaaggtattcaggctgctgcaccggtggatagctatgtgacaccggagccatgggccatgccggggtatgactgcgatgttattatggcggccggagcctttatctcaggctcatccatcgagctgagtgcggatggaccgatcaagccaccgtatgcggtttatttccagggcggtctgacatggcaccatggtaaattcggtattatgatgtcacttcagaaaatgaaagaggctggattagtgcatctgcctttgtaagatttttgtcagaaaggatttacagtaaactgtgtatacatgagaatccttttgtgataaaatgaaatgaactgtgaagctccgattgcctgaattgaaaggagcagcagtatgcagaaaatcaaaaaacatctgacaatgaaggagttaccggttacggaaaggccttatgaaaagtgtgagaaaaacggagcagggacgctttccgatgcggagcttcttgctattatactcaagacaggaaccagaggggacaaggtgatggatctggctgtacaactgctgaatttgaatccatcctgtccgggccttgaggggatcatggggcttgaacttgcagattttcagaagatacgcggcattggacgggtcaaagccgttcagttggccgctgtttgcgagttgtccagaaggatgacccgcattcagttcagtgagagttatgctttcacaacaccgcagtcaattgcggattattatatggcttatatgtgccgcctgggacatgaggaagtgcatgtgatgatgctggataccaaacagcatatgatcagtgagtgcctgcttaccaagggcacggtcaatgcttctttaattgctccgagagagatatttatacaggcattgaaagccggtgcagtcagcattgtactggtacataatcaccccagcggtgatgatacacccagcagagaagatctggctgcaacagaaaaggtgagatcagcgggcgaattgataggtatccggctgattgatcatattattatcggcagcggacattttacaagtctgtgcggaagctggaaccattaggaaaggggaaacaccattggcgggaagaaaatacggtctcgaccttggaacaatgaatatcaggatttttcagggcggacatggacttgtcgtatatgaaaagaatatgattgccatacagcgaaagaaagaagtagcggcaatcgggaatgatgcatttgaaatgtatgagcggacgccggcatccattgtgatctcgaatccggtcagagacggtgtgatcgcagacgttaacaatatgaacaaagtgacagaggcacttttgaaaaagtgcggatgtacaacgggcttcatgagaaataacagcttttatcttgcggtaccgtcagatgtgacggaggtggagaaacgggcctatttcgatcttattgcgcactccgcttataatacgcataatatttttgttgtagaaaaaccattggcggcagctcttggggagaatgtagatgtcaagagcaaaaagggtatgatgattgtggatatgggtgccggtacaacagagatcacggtcatcaccatgggcggaattgtggtcagcaagttgctgaaagtgggcggcaacaccattaacgcatccatttgtcagcttgtgaaggagcgtcatcatctggtgatcggggataagaccgccgagtatctgaaactggaattgggacatgcaattcccggacagggacgcggcaaaacagtatttggaagagatgtgattacaggacttccgtctaaagcagaagtttcagatcatcttgtttttgattccatgaagaactatctgtttcaggttgtgcggacaatccgcaacattatggagacaattccaccggaattgtccggagatatcattgagaacggcatttattttacaggcggaacgacattaattcctgaattggacagactgtttaatgcatccctccgtgtgaaggttgtttttgcaccgaagccccttgaaagtactgccagagggcttggggtgatcatggatcatgcatccgattataaggatctgacattctcattgagagatgcagcttttgaatagaggaatgaatatgaagaacaacaaaaaaaataaaataaacccgaagtatgtacttgcggccttaagtcttttgtgtattgccggtattggtttaagcctgtttcgtggtttctcgatgcctgcagccggtacgatcgtcaattcgctgatggcgcctatgcaggagggcatcaatagttttggtaattttacagcaggtattgtccagagaaaacataagacgacgcagctccagaatgaaaatgaggagctgaataatgaagtagataagcttcaggcaaagctgacagctatggagaataatctgtccgattatgaggatctgctggatcttctggcgctgtctgagaagtatccctcttatgatatgacaggtgcaaggatcattggtaaagatgcaggcaactggtatgatactttcacgatcaataagggaagcgttgacggtattaagaaagatatgaatgttgtcgcaggcaatggccttgtgggaattgttacacaggtcaatgccaattcggcagttgtcagaagtatcattgacgatgccagcaatgtcagcggtatgatcagcaagaaccgggatatctgtatcgtcaatggtgatctgacattgatggacagcggattgctggatgtcgaattgatcacaaagggttcaacggttgtcaagggtgatgaggtggtcacttcctatatcagtgataaatatctcccgggacttctgatcggttacatcagtgatgtgacagagaatgatacagagctgacgctcagtgccaaactgacaccgacggtggatttccagcatttgtccaatgtccttgttattaaacagctgaaagaggatatgaaagaaacaggaagtgcatcagaaaccgttgcatcggatacgcagagtacatccgagacacaaagtgatacggcggattcgacggacagcagcgaggagggtgaataatgaaaaagatattggcctatggcggtctgattcttctttttcttttattgcagtgctcattttttgtacatctcagtctggcagatgttgtgccgaatcttctgattatattgacagcatcgattgccattatcaatggcagtcttgagggatgtcttgttggattttgctgcggattgttgcttgatctgatgtttggaccgtatatcggcatgtacgcctttggttatatgctgtgcggctatttgacaggtattggtaatcgccttttttacaaagaggatttgacatttcccgtactcatgattgcagcagcagatctgttttatggattttatatgtatgttttcggttttatgatcagaggcagattgaatgtattgttttatttgcggaggatcatcctgccggaagctgtttatacagtgattatcgctgttttcctttatcgaattatattactgataacagagcacttagagaaaaaaggaagtgagaatctcattgtttaaaaatctgctggaagatatattgagttttattaaaacacgaacatttatcctgggcgttgtttatacgatactgttggctgttcttattcaccgtctgtttcagcttcagatcatcaatggcgaagattatctgaatacgtttacttatcgtattcagaaggacacagaaatagagagcccgagaggcaccatttatgattgcaacggggtgccgctggcgtacaacaagttgtcgaatgctatcacgatagaggacagcacattgctgacagataatcagacgagaaatacgatgattgccaagctgatcggttttattgaatcaacaggcaacacattgaattatgatattccacttgaaatggacgcttcaggaacgttgagttttaatgcaggtgagaataccgttctgagattcaaaaaggacgtttatagttcagagaagctgacggatgaacagacgaatgcgaccgctgaggatgtttatgcgtatatgagaggaaagaaactgttcaatctggacgaatcctattcaaaggaagaggcattgaagattctttctgtccgctttgatctctggatgaaacgttatgagaaatatctgtctatcacagtggctaatgatgtcaatgatcagctggtggctgcagtcaaagaaaatgctgaggatctgccgggtgtatcggtggaacagagttatacacgtgtttatgcggacagcaaatatttttctaacattacagggtatatcggatcgatttccgaagatgaactggctcagtataaagaggagggaaatgacagctattcgcttaacgatcagattggcaagaccggtgtggaatcctattttgaatccaagctgaaggggacgaaaggttctcagaaattgtatgtcaacagtctgggaagtgttctggaagtagcaaaaaaggaagatcctattccgggtgaggacgtttacctgtccatcgatgcagatctccagaaaaaagcctatgatatgttggaggagcgaattgcgggtatcctgctgacttatatgtcagataccacgacaaacacaggcagtgatattatgattccaatcaaagaatattactatgcgttgattgataataatgtcatcagtttgtctcatttaagtgcagatgatgcagatgacagagagaagagtttctggaaggactataaaaactacgagtcatccattacctcttccctggacagcaaaatggacacggcacttggagaattggatgatgagtataaggattatcttttaatgacctattccatgctgaaggataagtctatattgaatacaggtgatctggatgataatgacgaaacgctggctaaatggaatgacggaagcatcagttttaatgagctgcttgattatgccatcacgaaggatatcgtcaatatcagtgcacttaatctggagagcgattatctggataccaatgaaatctatcaggcattgattgaatatgtggcacaggaactccctttatatgaaggcttcgaaaaaaaggccatctattatatgttggagagtgattatataagcggtacagacatttgtcttttattgtattcacagcatgtactggaagaggatgatgattatcagggcctcctttccggcagtctttccgcaaagaattttatgtacaataagatttataatcttgagatcactccggatatgctggcacttccgccttgttcaggttcctttgtcctgacggatattaataccggcaaagtcaaggctctggtatcttatccgggttatgatgccaatcagatcaataatgtcagctattatgcatcgttgatcaataattcatcatcacctttatataaccgtgcgacgcagcagacattagctccgggttcaacttttaaaccgatttcagccattgcgggtctggaggaaggcgtgattgatgcagacacttatatcacagactatgtagaatatacaaaggttgtgccgcatgccaactgctggaattcagcgggacatggcaccatcaatgttgaacaggcgatagaatattcctgcaactacttcttctatgaagtgggttacaggctgggctcgaagaataatacaaccgaactgaatgattcaacaggtctggctcttttagccaagtatgcgaagatgttcggacttgattccgtcagcggacttgagcttccggagacaaccccgagaatttccgatgagagtgttgtccgttcagcaattggacaggcaacccacaactatacagcggctgaattggcacgctatgtgacagctattgccaattccggcaatttgtatcagttatccattctggataagattaccgacagtgagggcaatgtactggaggaaaatgaaccgaagctgaccaacaagattgaactgaaacagagcacatgggatatggtacatacaggtatgtataaggtatgtaatgaatcttcttaccgttcacaaatgggcggactgaaagtgactctggcaggtaaatccggtacggcgcaggtatcagagaaactgcctaaccatggacttttcattggttatgcgccttatgagaatccggaggttgccgcaacgctgatcattccgaatggtcatggttcttcaaatgtactggatctgtatgcggatctgatgtgttactattttggtgtgccggaaaagaatgcttcagatgatatatccggttcggcaacaagaacagcgaatattccggatcagaatattcaggcggattaattcaacggacatgaacatacaaaagaaaacaatgatctaaaaataaaaggattcaatggtttttgggaggtatgagcatgggagaagtatttgtcattacatcaggtaaaggcggtgtaggaaaaacaacatcaacagccaatatcggtgcaggtttagctgctgcagataagaagacaattctgatcgatacagatattggcttaagaaatctggatgtgatcatgggacttgaaaacaggattgtttatcatctggtagatattatcgaaggcgggtgccggatcaagcaggcactgatccgggataaacgttatccgaatttgttccttcttccatccgcgcagacgagagacaagacaagtgtttcgccggaacaaatgaaaaagctgatcgagcagctgagagatgattttgattatatcctgattgactgtcctgcaggcattgaaagaggcttctacaatgccattgccggggcagatcgtgcattaatcgtgacaacaccggaggtatcggccatccgggacgcggatcggatcacgggtcttctggaagcatctcatatcaaaaatattaatctgatcattaatcggatccgttttgacatggtaaggcggggagatatgatgagtatagaagatattgtagatattttgtcactggatttgatcggtgtgatcccggatgatgaaaatgtggttgttgctgccaatcagggggaatcattgacaggttatcatacgcctgcgggaaaagcctatgagaatatctgcagacgtatcatgggagaagatgtttccctggcttgttaccctcgaagaaaaagctttttcttccgggttgcggattatctgattcacagatagaaaggagctgtcaggatgttttcatttctgtttggaagaaaaagaaagatttccggtaaagtcgccagcagccggttaaagcagctgcttctgtcggacagaatagcctgtccgacagagatcacagatagtattcgaggagatattgtatctgcacttagcaaatatgtcgaaatagacattcagaatattgacattcatattacacaaaaggaaaatcagaatcggtccaggtcaccgcttctgactgtttacgtgccttttaaggaaataaaccgtcattcggtatgataggagaaaaatgttacaaagaagaaaaatattacagtatcacacaaataaatataatatccatatgtataatttcagactggttttatatgtatgggtgctaagtattattggtatacttgttattaacagtgcagccgatggtttcgccgctaaacagctcataggctttgtcggtggatcggtcgtcatgataattttttcacttattgactataattatattgcaaaattcgaatggtttttgtattctattaatataggtatgttgattgctgtcaagttttttggtattagtgtgaatggtgccagaagatggttttcattggggccttttggtactttccagccatcagaactcagcaaggtgatcatgctgattatttttgcacatctgatcagtgagcagaaggagaagatcaacagtctggcaacgattctgaggattggtattttatatatgattccgatgtttctggttgcatgggagccggatctctcgacaacaatggtttttgcatttttgttttgtacattgatgtttgttggcgggatcagttataagattatcggtgcgatactgggtgcagccctgccgttgggcggtattttgatctggtatatccagcagcccggtcagatcttattacatgattatcagcttaatagagttctcagtttcctgaatccttcggattatcttttgacaacctataatcagcaatataattccattatggcgatcggctcaggtatgctcactggtaagggacttgataataatacgattacatccgtcaagggaggcaatttcatatcagagcctcagacagactttattttcgcagttgtcggagaagaactgggatttataggaagttgtgttgtcatagggctcattttattaattgtgatcgaatgcctgcgtgttgcaaaggatgcaagagatatgagaggccacctggtcgcatcaggtgttgccggtattattacattccaggcttttgtcaatattggtgtggcaacaggcatgctgccgaatacggggcttccgttgcccttcgtcagttatggtctgagttcattgctgagtaattttatatgtattggtttagttttgaatgttggtttacagcggaacaggaggtaagtttttatgaacattggtttagtagcccatgatacaaaaaaaatgttgatgcagaatttctgtatcgcttacagaggaatactggcgcgtaatgaattatatgcgacaggcaccacagggcgtttaatagaagaagtgacgaatcttaatatacacaagtttcttgccggacatctcggcggagaacagcagttaggtgcacagattgaacataacaacattgacttgatgattttcctgagggatccatatacaccaaagcgtcatgaaccggatgcccacgcaattgtcagcttatgtgatgcacataatattccgatcgcaacaaacctggcaacagcagaacttttgatcaaggctctggacagaggcgatctggaatggcgtgaattttataaataacaggtgaagagaatgaagaaaatattagcagcagcctgcatatgcagtgtactgttatgcggatgccagagccagacagcgtatctgaagccctatacagttgtgacggcgagtaagactgcagatgcggcttccatgctgaatatagaggcttgggaaggctttgcggagaacctaggtgttgtatcggtggaagatagtgagaacggcatcaaccaggagacactttcacagcttgacgccaaggaaatttttctgacgggcacaacggataagacggtcatcacggcgaagaatatttatacacagatgccgccggccagcattactaagattctgacagcgctggtggcactggagaatgttcaggatctggatcaggaagtaactttgacggatgatgtgaatgttgatgtcgcagatgcacaggtgtgcggttttaaagccggagataagatgactttgaagaccttattgtattgtatgctgatctattccggcaacgatgcagccaatgccgtagcttctgcagtcagcgggggagatataccggctttttgtgacaagatgaatgcggaagcccagaggcttggtgcaacgcagacacattttgtgacgccgaatggtctggatgatccggatcattatacaacagcttatgatctttatttgattttcaatgaatgtctgaagtatgatctgtttaaggatgcgattcatcaggcacattatacctctgtatttacacggaatgggcaggaagtgcagcagacgtatgactcgacaaattattatctgctgggcaacaagacaccgcccgaaggcgtcagcattattggtggcaagaccggtacaacagataatgcaggactgtgtctgattctttatgtggaggatggctcaggaaacggttatatttccgttttgcttggttgtccggataaagatacgctttattcgagtatgtcaaaattattatcagatattagcaaataagcattgtatttttagacaatttatactataattaagacaaatatatttaaatttttttaaatttaaatataatttacgtgcataagctaggaggagattacaatgatacagattatatcaggtgtaaaaggcaaaggtaaaacaaaattcttgattcagaaagcgaatgaagcagtaaaggctgcaaacggcagtgttgtctatctcgacaagaataacaagcatatgtatgaattaagcaaccgcattcgtttgatcaatgttggcgatttcccgattgatacatatgatgcatttattggatttatctgtggtctgatttcacaggacagagatctggagcatatgttctttgatagtttcctgacaattgcaagcgtatctgatgattatgttggctacgtattatctaaacttgcagatgtatcagagaagttcaatgtagattttacgatcagtatttccattgatgcggataatattccagaagagtttaagaaggatatcgttatctccttataatttggatattatatcatgatttagaagaaaacagcagaagtacttaagtggtatttctgctgtttttgttctgtatggagccatttcatttccccggaaaaggattaatttgtcctgagtttccagaaaaggatcagggaataaataccggcaatgcccacaacggcaaaaataatccgggtcacagcagtgagtgtgccgaagaagtagctgatcaggtcaaattcaaaaaaaccgatgagtccccagttaatagctccaatgatgatcagtatcagagctgtaatgtcaagccagttcctttccatgtcaattcctcctttcgcgaagcggcatgatatcattattattgaataaaaattgaagattatgtgtactttatgataattttgtgaaaaagggttccaatataagtcaaaaaaagatataattaatgaatgcaggtatttatgaaggaggaaaaaacagtgttttatccctattccagctggcttaaacagcgctatggagaaaaggtttacaagcttccggtcaacctgccggtatcctgcccgaaccgttgtgacggacatggaggatgtacattttgttctgaaaagggaaccgggtttgaatctgtcttgcagcctgcatcggtgacggaacagatgcagcatgcaagagatgttgttgccaaacggtataaggcccgtaagtttattgcatattttcagaattatacgaatacatttatggcaatggaactatttaaagcttatctggaggaagcggcggcttttccggatgtggttgagatttcggtttccacaagacccgactgtatccgtacagattatctggcgtgtctggcagaacttcaggagcgcacccacgttggcatcaatatagaattgggattgcagacggcgaattatcataccttggacagagttcacagaggacatggactggctgaatatatagatgcggttctggcaatcaagagatatccgtttactgtgtgcacacatctgattgccaatctcccgggagacactcttcgggatgcagtggaaacagccagaattgtttctgttctgcattcggatattgtgaagattcattcattatatatagcaaaagacagtcagatggctgaggattacctggcaggcagacttacgatctgcagcaaagaagaatattttgaacgtgtcagggtaatgcttgagaatctggatccatctatcgcggttgagcggttgttcagtcgtataccggagcaagatgctgttttctgtaactggggaatcagctggtggaagctgaaggatgagtttgaagtatatatgcagcagaatagcagctgccagggtaaacattttgattatatgaatggttcggcactaaaaggagttttttaatggggtcagagaaacagaccgtctcgaaaaacggcgggaggcacttgaaactgaatatagggctgattgtatttataggtatttttatttatttgatagcgatcggtctgtcctaccttatgagaaatcatatttctttttatgaagttcagcaaggatggattgttgacagtgatacctttacaggctttattcttcgtaatgagtcagttgtaaataccggacaaagcggttatatcaactattttgtcaatgatggtgccatggttgccagagagggcaatgtctgcatggtcactaccaatgccggcagcagtgtacagggaacagcagatggatcagcattgacgttgaatggcagtgactatagtgatattcgggaacaggttttgtctttcaaaaagaaatataacgatagtgattatgcgtcggtgtatgatctggattatcagttgggaaatattgtcagtaatattgtcagcaggaataatattaattccatgaatcaggctgattccgccagcggatatacggtaatgactgctgatcagtcaggaattgtcagttattcttatgacggcatggaaagctatacgcaggatgatatgacaccggaacttttttcggccaggaactatgagaagacccagttgtctgccggtatgaagatagacagcgcatcaccggcctataagttgatttatgatgataactggcagattgtgatttgtccgacggcggatcagtacaaaaggctcaaagagctggatacggtgaatctgcagcttcagcgggacaatattacagtcagcgcagatgtatcgacctttcagaaagacggcaccgattatgtcagcttttcgttatccaactatatggtccgctattgcaatgatcgttatattgatattgagattatctgggacaaccatgatggattgaagattccaaagtcatcaattgtgtccaagaatttttacagaattccggctgattatctccagacggaggaagagagttcggaaagcggcttttattcggtggataatgatgaaacagtttttatcaaaccggttatttatgcacagaataaggaatattgttatgtagactgtgcggatattgcggaaggtactgttcttaagaaaccttcttccgatgagacctatacaattggagagacagaagctttaaaaggtgtttataatatcaataaaggctatgcaatgttccgcttgattgatattttgtatgaatatggcgattattgtattgtcagtgataagacggattatggtgtgacgttgtatgatcatattattttgaatggcagcagtgtcaaagaaaatgatattatatattagatatagatgaaaggggaagaaatatgcttacagagaatgtaatagaggttgaaaagcatgtccaggctgcctgtgacagagcaggacgttcaagagatgaagtcactttgatcgcagtgagcaagacaaagccggtgagtgatattgaagaggtactgacaacaggtattcttgactacggtgagaacaaagttcaggaattatccgacaaatacgaagtgcttccgaagaatattcgctggcatatgatcggacatcttcagcgcaataaggtcaaatacctgattggcaaagttgtcctgattcattccgtagattcactgagactggcagagcagattgagcatgaggctgcaaaggcggatatcgtgatgccggtactgatcgaggtgaatgtggcagaagaagaatccaagtttgggacaaccagtgaggctgccatgcagcttgtggaagcggtgtcgaagatgccgcatatcaaaatcaggggattgatgacaattgcgccatttacggataatcctgaagataatcgtatctatttcagaaaattaaaacaattatctgttgacataaaaagcaaaaacattgataatgttgatatggatgaattatcaatgggtatgacgggagattatgaagttgcaattgaagaaggtgcaacaatggtcagagtgggaaccggtatattcggcaagagaaattatcagatatagataatttgcagttatttgaagcagaagacatttgaagggctggttttgaatagttggtaattgattaaataagtagaggagcgtatagcagaatgagtaaaggctttaacaaaattcttgattttatgaagcttaatgatgatgaatatgaagaatatgatgatgaagagatagatacagaagaggagccggaggaggcaccgaagaaaaagacatttgcacgcagtacggcgaatagcagaaagacatctgcgagacagaaggacgagctggaagatatggcagatgactgggatgatgagccggaggtgaagagtacacggtcaacacaggcccatacttcatcacgaagcacgcgtaaggcaacgccttacggcaggagcagcaagattgttccgatgcactccaatataacatcccgtagcatggaggtatgtgtttcaaaaccggatgagtttgatacatgccaggaaatctgtgacattatcctgtcaggaagagctgcgatcatcaattttgatgctgtaacaacgcaggaagctcagagaattattgattttgtttccggttcctgttatgcgattaacggcaatattaagccgatatcagatacaattgttattgtgacaccggaagatattgatattacaggcgatcttcaggaactggcatcttcaagtgtcaatgtacctgcttttggatattctgaagaagaggaatgactattcggaaacgggaacaggaagaaacaggatgatgagatcgatagacagatgaaggaggtctggaattaatgttaacaccaattgaaattcagggtaagacttttaagaacagtggtatggggtattcaaaggcagatgtggacagctttttctcaagtgtttctgctgattttgaagcactttacaaggagaatctttctttgaaggaaaagatcaataatctggatgcaagtctcagccattataaggaaatagagaagtcacttcagaaggcacttgttcttgcagagacaactgcagaggagacaattgtaggtgcgaagaagaatgccactgttattgaacaggaagccgttttgaaggcacagtctattgtggcagatgctaaggtggaacttgagcaactgcatgtgaagacaacagatctgcttcagcagtatgaccgctacagaacacagtacaaagcacttgcttcggcacagctggatctgctgaattcagaagcatttgatattgatgttgcaacgatgaaggcaatttcaggccttgaggaatcagccgcagagcatacagatcagcttcaggctgagccggtatatgctgtggaagagactgagagtgaagaaaccgcagtagaacaggaagaagactttgatgagacactttcaacagatgatgcaatgatcaaggatttctccgagatgtttgacagcgagaaggacgaagagaaccaataaagcggatgtacttatttcagtatagcatagttattaatagaatattcagaagtccgggtcagtggctgaagcgcatgcccggactttttgtacagaaaaggaagacagcaaaatgcagaaaatgatgattcattacaatgatgtaccaatttatccaattgttctttcggagaattttgatgcgcttggtgaagagctggatgatctgatgatcaaagacagaaaggtgtgcatcgtaacagacagccatgtggcagatttttaccttgaacaggtagagcatattgtaaaagagcattgtgcagctgccagtcattttatttttccggccggtgaagagagcaaaacgctgacaacagttgagaatctttatgaatttctgattcagaataaatttgaacgtaaagatatgctggtggcgcttggcggcggtgttgtcggtgatctgacaggctttacagcggcgacttatctgagaggcattcgttttatccagattcccacaagccttctggcacaggtggacagcagcatcggaggaaaaacaggtgttgatttcagagcttataagaacatggtgggggcttttcatcagccaaaactggtgtattcctgtgcagagacgttgaaaacactgaccagtcagcagtatatatccggcctgggtgagattattaaacacggattgatcaaagatgccgcctactatgaatggctgaaggtgcacaaagaagcaatcttggccagggatacgcagacggtgattgatatgatcgcagtcagctgtcacatcaagcaagaagtggttgagaatgatcctgaagaagccggcgaacgtgctttactgaattttggccatacattggggcatgcagtggagaaactgatgaattttacaatgctgcatggagaatgtgttgccgtcggcatgcatgcggcggcatggttgtccatggagaaaggaatgctgacagaggcggcttataaagatatcacagataccattgcatcattcggcttgccggtcagtgtcaaagggcttgagcctgagcaaatcgtagccgtttcaaaatcagacaaaaagatggacaaaggacgggttaagtttatactgctggatcccgaagggcatgcggtgattgaccggagtatccgtgatgaacagcttttggcagcggcctccgttatcgtcagaaatggagaacagtcatgaaatatataaaggcgggaattgcagttttgctgctggttcttctggatcagtggaccaaggtgctggccgtaaggcatctgatgaatacagacggcatcacacttataccgaaagttttcagattatattatctggaaaacagaggctctgcttttggattaatgcagaatcaaaaagtttttttagtcttttttacagttatcatactggcagctttgacgtttttttatcgtaagattccggataccggaaggatgatgccgcttaaaattgcagcggttttgatttatgccggtgccatcggcaattttattgatcggattcgtcagagctatgtggtagatttcttttattttgaattgattgattttcctgtgtttaatgttgcagatatttatgtgacaacagcggccattgccttgatcatcctcgttatattttattacaaggatgaggattttgagtttcttggcggtaagaaagcaaagaagacaaaagcataaaagaggcaggtgaaaacgtggaacaaagaagttatgttgttgatgaagccaatgatggcgtacgtattgataagtatctggcactcttgatggaagaatgctcaagatcttatatacagaaaataattggcgatcagtcggtgtgtgtaaacggaaaagcggttaaggcgaatttcaaaattcatacaggtgatgcagttatgattgaattacctgatccggttattctggatattcagccggagaatatacctttggatattttatatgaggatcaggacattctgatcatcaataagccaaaggatatggttgtgcatccagcgccgggacattataccgggacccttgtgaatgcagtgatgtatcactgcggggaggacctctcaaccatcaatggcgtattaaggcccggaatagtgcatagaattgataaggatacaacaggtgtgcttgttatctgcaaaaatgacagggcgcatcgcgccattgcggaacagctcagcgtgcacagtattacaagggcctattatgcgattgtttataataatatcaaagaagatgagggaaccgttgatgcaccgattggccgtatggatgccgatcggaagaaaatgggcattaaccataagaacggcagacatgcagtgacgcactaccgtgtacttgagcgatttggcaaatacacctatattgagtgccgccttgagacaggcagaacacatcagatccgtgtgcatatggccagtatcggccatcctctgctgggggatactgtttatggtccgtctaaggatccgtttaagctggaggggcaggcgcttcacgcaaagctgcttggatttatccatccgtccaccggtcagtatgtggaatttgaatcaccgcttccgccatattttacagcactgctggacagactgcggcagtcagccggcagataaagatcctactgttcatgcagtacaatatgtgataaaatagagtcagaaaaggcaggggatagagatgaagaagcacaagaaggatccactctataaaagttttggttatgcctttcagggaatttatacatgtatcagcaaggaacgcaatatgaagattcattgctgtgtttcactgcttgtagtgattgcgggcattatctttcaattgtcagtgacagaatggtgtatctgtctgacattgtttggacttgtgatggcattggagctggtgaacacatcgatagaggcagtggtggatcttgtaacagaggagcgaaagcctttggcgaagattgccaaggatacggcggcaggagctgtactcattgcagctattatggcagcgattatcggctgtgttatttttgttcccaaggtcatgcagtttttgacagggctttagtgatttgttgattggtttcatggatgcattgcagctgcagagagagaatccggcggttgtgatgtctgacagtaaaggagagatgtaagatggaaaaactcggagaaagccttaagaagcttttacttatcggtatcggaacagcagctgttacagcagagaaatccaaggaagtattagacgatctggtgaagaagggtgaactgacagttgaacagggcaaggtcctgaacaaagaactgaagcacaatatcaaagagacattgaaggacaatgtgaatgtttctgtgaaagcatccacaccagaagaattgcagacccttcttgagaagatgacaccggaacagattgaacagctgaaacagcagattagcaatatggagcagaccgctgaggagaagacagagacagtggaatcagaagaagcaccggctgaagctacagaggacgctccggctgcggaagaggcagctgacgctgaataagaagaatgaatacaaagtctgaaaaagtcagatcaagcggttatggagaacggttgaaggagattacagccgttctccataaacatgctattacgcgtggtgtatctccggagaagttgagaatgattctggaggaccttggaccgacatatatcaagctgggtcagattatgtcgttgagatcagatattttgccgaagcgatactgcgatgaattgatgaagctatgctcggatgtggcacctatgccctttgaccaggtggtggatgtgatccaggatgcctttggttgtccgtggcaggaggagtttcagtcaattgaagaaaagcctcttggttcagcttctattgcacaggttcatcgtgcggttttgaagagcggagaacaggttgtgatcaaggtccagcgcaaaggtatttacaggaccatggccagagatatcggattgatgcataaggttgtgcgtttattgccaccggtgagtatcaaagagatggtggatctggatcttgttcttgatgaactgtggaaagtcacacaggaggaaatgaatttccttacagaggcagccaatatagaggagttccatcgcaagaacagagatgtggcttttgtggatacgccggtgttatatcgggagtatacaactccgcatgttattgtgatggagtatatcgatggcttttccattgatgataaggagaatcttcaggaaaacggctatgatctgaatgaggtcggcagtaagctcattgataattttattaagcaggttatggtagatggctttttccatgccgatccgcatcctggtaatcttcgtgtgcgggacggcaagatcgtctggattgatatgggaatgatgggccgtctgtctgagcatgacagggaagaaatcggacgggccattgaaggtattgcgctgaatgatatcggtatgatccaggatgctgttctggcaatcggagaattccgtgggaagccggatcagagcaaactgtttgaagatatacgcaatctgatggccaaatacggttcggaagatcttggcaatattgatattgcagagattatgcaggatctgatggaggtcatgaaggagaacaagattacaatgcctcacggtctgacgatgcttgccagaggcctggcacatattgaaggagtccttgcagacatcagtccggagattaacatgatggagatcgcatctgcccgtgtgaaaagccagatgtttgaggagatggactggaagaaggaattgaaaaacagtggaaaaacactgtatcgttctctgagaaaggcgatagatatccccaccttgctggcagatattctgcagggtcagatgaaaggtcagacaaaggtgaatctcgatcttcatgcgggagaagatgtatcgaatctgcttcgaagggtaaccagaaatattgttatgggtctgtgggtaatggcattgcttataagctccagtattatctgtaccacggatatgaaaccgaaattccttggcataccggcattgggggcctttggctatttcattgccgttattatcgtattttatgtgtttgcaaaacatattttttcaaaaagaaagtaaaaataaactgaggctattactgtgtttggcagctaattcctcagtttattttttgcgttttccgtttgcggatgagagtggaattttatccggctttagttttatgaatgagtcgaagaaaaaatatgtaattatattgattattctcgataaactccggtttatcataaaaaataaaattaagatggaaatatgttgaccgttttcatcttctatatagaatcgataataccatttagaacctttttgcctgatagaacctttactcattgttaatgcctccttaaatatagtatttattattatagaaaaaagctataaaaatatgacgatgcatacttttatagctttccctttatttttcccttatatgattagtagatatccattttgtatttatacacgttctgcaatatcgtacagcagtctttcagaatcttcccagccaaggcaagggtcagtgatggacttgccgtagacatggttctcaccgcccaccttctggttgccttcaacgatatagctctcgatcatcacacctttgacaagcttgcggatgtcatcggaatgctgacggctgcttaagacttccttgacaatacggatctgttctttatgcttcttgccggagttggaatggttggcgtcaatgatgcaggccggattcttgagtcctttttcggcatacatttcattgagaagctgcagatcttcatagtgatagttcggatgagtctgaccatgcttatcaacagcaccacgaagaatcgtgtgtgcataaggattgccgtctgttgtggcatcccatccgcggtagaggaaattatgaccatgctgagcagcaacaacagagttcagcataacggataagtcaccgctggtcggattcttcataccggttggcacttcaatgccactggcaaccagacgatgctgctgattctcaacggagcgtgcaccaacagcaacataagagaggatatcggacagatatctgaagttttcagggtaaagcatctcatcagcaattggcatatgaaatgtctgcagggcatgcatatggatctttctgatggcaatcagaccatttaaaagatcgggtgccttttcaggatctggctgatgaagcatacctttgtagccttcgccggttgtacgcggcttgttcgtgtaaatacgcggtacaaggacaagcttatctttgactttttcctgaacttttgtaagacggccgatgtaatcacaaacagcttcttcgttgtcggcggagcaaggaccgataatgaccataaatttgtctgaggcacctgtaataatatcaatcagttcctggtctttctctgcttttaaagcagccagttcttcggaaacaggatataattctttgatttccattggtgtcggaagtttttttgttaatacaaagctcatagtgtttctctccttggtaacatttgtacaacggcaaaaagaataagcagttatacttttctgcaatcaattatagctgaaaaggaaaatgatgtaaaggcataagttaacaggcacaaacgtaaactgtaaaaaaagcacggtgacagttatgaagaataaaattatagcagctatcctgttaatgggtattttatggaatggacaaatggtttatgcagaagatactgctgtcggagaagtgatagcaacggaatcagaaaattcagaatcaacaaatgcagaaacgacagagatggaattggaaaggaagtcggaaagtcagggggtagtatcaactgaatcggcggtaactgtcatatcggaggcggctgttttaatggaagcaggaaccggaacagtcatttatgagaaaaatcaggatgttcgggtcagtcctgccagtatcacaaagattatgacactgcttctgatctacgatgcgttgtataacggaaaaatccagctgacagatgaagttgtaacaagtgcccgggcaaaatccatgggcggctcccaggttttccttgaggaaggcgaaaaacaaacagtggaaacgctgatcaaatgtattgtgatcgcttcaggtaatgatgcttcagtggcaatggcagagtatgtaagcggcagtgaggaggcctttgtggaggaaatgaatcaaaaagccgccgatttgggcatgaacgggacacattttgtggattgctgcgggctgacagattcaaatgaccattatacaacggcaaaagatgtggccatcatggcccgggcgctcattacaaattatcctgacatttcgcaatatgcgacgatctggatggaaaatatcacgcatgtaacagcaaaaggcagtagtgaattcggtctttccaacacgaataaacttctgaaaatggcaaataattttgaagtaacagggttaaaaacaggctctacagcaaaggcgggatattgcttttgcggaacagctgtcaaagacggattgagtctcattgccgtggtgatggatgcaccggattataaaatacgtttttccgaggcacagcagcttctgaattacggctttgccaactgcagcgcatacagggatgatcatccgccggtacttttgccaatggcgataaaagacggaaaaacagaaagtgttgaattgatgtatgacggccagttttcctatgtggcgctgcgaggggaaaatcttgaaaatatccattcaaaactgcaactggatgaaagcctgtctccgccttttgaagcaggaacaaaggcaggacgtctgatctattatctggatgatatggagattggtgaagtgcctattgtgacaaaggagaggatacaaaaagccggtttcagtgattatttagaaaaagtttacaggaattttatgagcatctgcggataaatataggctattttacaaaaacatggtataatgaactttattgaaaaacatatcggaggtttatgtgcgatggagcagcgtgtattacttatggtgaatccaatggccggacgtcagaagatacgtaatgaattgctttatgtcgtcgatacactgacgaaagcagggtatgagacgattatttatacaacacagggtaaggatgcaacaagagatctgttggctgagaaggatagtcagtttgacagagttatttgctgcggcggagatggcacctttaatgagattttgtcggcaacgatgcattggaataagcgccctattctggggtatattcctgcaggaaccaccaatgattttgcagcaggtctgaagctgccttcagatatcagggaggcagcgatgaacattgttaggggaacgccgcataccgttgatgcaggtttgtttaatacgtcctacttttcttatgtcgcttctttcggtgcttttacggagacatcctattcaacaccgcagaactttaagaatgcattggggcacctggcctatattcttgagggcatcaaagagattccggcatttacatcctatacggtctgtgtggaagcggatggacagatttataaagattcctatattttcggtgcagtcagcaatgccagaagtgtggggggtattttgaagatcagtgattctcttgtggatttaaatgacggtgtgtttgaagtgatgatgatcaagatgccgaagacattgatggatctcagtgcaattgtgacatcgctgacatctttgaatccgctgaagtatgatccgtccatgtttttgttcctgcagacaaaggaattgaagattacttttgaacaggagatggtgtggtccctggacggagaacgtgtaagcggcggtaaagaggcaagaattgcctgcatcaaagatgcattcaaaatattaaccgtataatggaggccgaatgaaagataaaaagaaatggatgatggctgccgcagcggcaaccggtgccctcatagggcggatatgctatgaatgcagacattttacgacagaatattatgatgtagcatcagataaaataccggaagcttttgaaggcttccgttttgttgtgctgtcggatcttcacaactatgactttgatcagggcaacaggcagctgcttagggcgatagagcgtttgaaaccggatgcagtgatgattgccggcgatatgatagatgcacatccgggagcggatatgtccgcagcagttcggatggtccgtgatctctgtgaccgatggccggtttatttcggcaatgggaatcatgaacagcggattgccctgtatccggagacatacggtgacatgcatgcgcgttggtgcaaagcgattcgtcatccgaatcttcatttgctgcgcaatcagcatacagtgatcaggaaagacggcgcatacatcaatatttatggattagaattgaacagaacatattataaacgtttcaggaaagtgccgatgaagaaatggtatcttacggagcagctgggcatctgtgacagaaaagcattcaatctccttttagcccacaatccgctgtattttgatgaatatgctgattggggggctgatctggtcctctcagggcatgtgcatggcggtgttgtgatcttgccgtttttgggcggcgtgatttcgccgcaggtgcgtttgttccctaaatattatgcgggaacttattttcgtggcaaaagcgagatgattctgagccgtggactgcacatgcacagttttcgtattcgattgttcaatatgccagagctgtcatgtgtcacactgcatcattcctgaagaaaatgattgacagaaatgccggaagatgccacaatagatagacgaaaggtaacgattcagtgaatactgccttctggatagttacgacgaaaggttcaaaagcagaatatgatggaaatgacatttaaattagaggtttttgaaggtcctctggatttactgcttcacctcatcgatatcaataagatcgatatttatgatattcccattgcgatgattacggatcagtatatggagtatattcatcgcatgcagattgaagatatggatgtgaccagtgattttctggtgatggcggcgacacttcttcggatcaagtccaagatgctgctgccggtggagaaagccgatgcagaggaaacaggtgaggatccgagaatggaactggtgaatcgcctgttagaatacaaaacctacaaatacattgcccaggaactgaaggacagggcttttctggctgctcagacgctgtataaaccgacaacgattcctgatgatatggtttatacagaaccgccggtggatttagatgcgctggtgggggatatgaatcttgagaagcttcacaggatttttcagtctgtgatgaagcgacagtttgacaagatcgacccgatcagaagcaaatacggacggattgagcaggagccggtgaaattgtcggacaaaatgaccagtatccgccgtatcgtgacagacaggaagaagccggtcagcttcaggggccttttgacgtcgcagtcaacaaaagaggaagtgattgtgacatttctggcgatactcgaattgatgaaggatggctctgtgacgatcgtgcaggagcatctttttgatgatatactgatttcgccgggggacaatatggacaaatccgaagagaatcagatatccgatgaaaatgcaacaggagtgacagagtagacatggaagaagttttaaagccggatgaggcggaagcggccatagaggcgcttctttttacgatgggagaagccatcagcgcagaggccatcggtgctgttattggacatgataaggcgacagtgatcaggcttgtacatcatctgatggacagatatcagaatgagaagagaggcatccgtattattgagttggatggctcttttcagatgtgtacaagccctgagatgtatgattatgtgattaagctgacgcatcagccgaagaagcaggtattgacagatgtcatgcttgagacgttggcgatcgtggcttacaagcagcctgtgacaaaggcggaaatagaacagattcgaggcgtcagctgcagccatgccatcaataagctgttggagtacggtctgatcacagaggccggaaggctgaatgctccgggacggccgattcttttggcaacaactgaagaatttttaagaacatttggcgttcagtcggtggagggattgccgtccgtttcaccggaagagatggagacactgaagacagaggcggaagaagaagttcagatgacacttgatgtatagagaggaacagttatgaagaattctaagaaaaaaacaatgcgtttttatttaacgctggcaggtatcaaagtattgatcaaagttctgcagctttgcggcaggaatgccacacatgtacccggccgaaaggcgattaatatctgtccggattttctggatcagattgataaaccggagtttatcatcggtattaccggtaccaacggcaagacaaccgtttcaaatctgattgcggatgtgatgcaggataatggctatgatattattgacaatcgtttcggcggcaatatcgattcaggtatcgcttcttcgctgatcaagaattctactatgggcggtcatatgaagaagaaatatgctgttcttgaaattgatgagcgaatgacaacgaagatatttccatatgtgaaaccggatattcttgtatgtacgaatcttttcagagactcttacaagagaaatgcccattctgaatttattgcaggtattttgaatcagacgattccatcaacatccaaactgattttaaatggagaggacttagtgagcaatcatctggcaccggacaatgacagagtttatttcggtattgcctgtgaggatgagaagacaacttccaccaacaacatcatcaaagatgtggttgcctgcccgaaatgcggtgcaaaactgaactatgaatatatccgttataaccacatcggacgtgcgttctgtccgaactgtgattttggttcaccggagatggattatgccgtggaagcaattgattatgagaaacgtaaagtgcatatccgtacaccgaagggcaatatggaagtgaagctgctgggtgataatattacagatgtttacaataccgtgacaactgttgctgccttggaggagtttggtctgtcagcggaggctatcagtcgttccttcgagaaaatgaagattgcaggtacacgttttaactgtgtggaagtcaaaggcaagaagctggtcacagatgttgcaaagggtcagaatccgattgcagtatcaagagtttgtgacttcgtgcgtcatgaaccgggtcaaaaggcagttgtactgattgtggatgatttctatgatcggcaggagtcatcagagaatattgcatggttttttgatacagattttgaatttttaaatgatcccggcattgaacagatcattgtgggtggttttcgctgtccggatatgcatctgagacttctgatggccggcattcctgaggagaagatcgtatgctgcgataaagagccggacacagcagcgtatgtggattttgataaagttgacaatgtgtatattctgcatgatatttacacaacgcaatatgctaaggctattcaaaagagcttaagtgaacagttagaaaaggagggcagataatcatgacacgtattgaagttttatttccagaattctgcagtctttttgcggattccagtaatatccgttacctcgaaaaatgtctgcctgatgcggaatttgtgttcacgtcttatatggatgagccgttgtttgtaaaagaacagccggatttgatctacatgggagccatgacagaaagtgcccaggagaagatcatcaggaaactgatgccttataaggcgcgtattgcagagctgatcgcagcagatgtgcccatgttatttaccaataatgcagtcgagatttttggacagtatattgagaatgaagacggttcaaagatcgaagcgctggatttatatccgatttatgccaaaagggatatgatgcatcgtttcaactgcctggtgagaggccattttgatgatattgagattgtcggttttaagacacagtttactatggcttacggtgagacggagaaatatccgtttattcatgtcgataagggaacaggcatgaacaaaggaacagccaatgaaggcattcgcgaccataatttctttgcgacttatctggtaggccctttcttgatcctaaatccgctgttcacgaaatacttgttgaatgatgtgatgaaactggatgcaaagttggcctttgaaccggtgattatgcaggcatatgaacgccgcgtcaaagaatttaatgatccgaagaccgaattttaaaatctaatcttatatactgcataggcagcatatttttgcacagactaagagcagcttacagaactgtttttggaggtgtgcaaaagtgatgaatatacagaaatgtgcaattgtaggctgcggcgccgttggggcgaccgcagcctatactttacttgggagcggtctttttaatgaactggtgctgatcgatatcaatcagaaaaaggcagaaggagaagccatggatatcggtcacggtgtgccctttatccaccccgtggaaatttatgcgggtacctatgaggatttggcggatgcgtatctggtgattgtaacagccggagccaatcagctgccgggagagtcgaggattaatctgacagaaaaaaatgtccggatttttcagtccattattccggaaattgtccgttacaatacggaatgcctgctgcttattgttgccaatccggtggatattctgacaactgtggccctacgtctgtctggttttccaccggagagagttatcggcagcggaacagtactggattcttccaggttcaagtaccgtctgggagagtatatcggtatcgaccaccgcaatgttcatgcatttattattggggaacatggtgacagtgaggtggcggtctggagttcagccacagtatccggcatagctgtgagggacttttgtgatgaactggggattgtctttacacgggagcagatggatgagatcgtccgggacgtgaaaaacagtgcctatgagattatagagaaaaaaggagccacattttatgcagtagcgctggcaatccgccgtattgcggaagcgctgatccgggatgaacattccctgttgaccgtgtccgggtattgcagcggagcctatgagattgaagatgtctgtattgggcttccgatgatcctgggcagggatggcattgagaatattgtggaaattccgttgaatcagttagaaaaagataatcttcatgaatctgccaatgcactgaaaaagattttgacggatatgggtattaattaagatgaaaaatgcatagattaagccaggagtatcaatagataaggtgatgccctggcctttcaataaaaggcggcaggcaggacctgaaaggacggtttgtgagtgaatgactggattaaacaaataggtcaattcctactggttgctttaggcatatgctgtacattgttcattctaatacaaaatcctgcggcagcggcggagactgggcagcaggaggaaaaagagaagctgtcattaaacgcccgcgcagcagtactgatggatgctgacagtgggcgtattctttacggcaaaaatgaaacaatggcctttcctatggccagcacaacaaaaattatgacattgatcgtggcattggaacataatgaaccggatcagattgtgatggcttcagcaggggcatctgctatgccggaagttcgtctgggtgttcatgagggggaacgctaccgtatggaagatctgtattatgccatgatgctggaatcttttaatgacgcagctatgatgattgctgaaggtaccgtcggcagcgtagaaaattttgcagaactgatgaatgaaaaagcgatatcacttggatgtacgcagacatattttataacgccgaacgggttggacgctgcggacgaaaaaggtgtgcacagctctacagcagaggatatggcgaagatcatgcgatatgcgatcgacaatgaagattttttaaaaattacacagacagcggattattcttttacggattgtgataggaaaagaagttttgaggtacataataaaaacgtccttttgaccatgatggatggtgtactatccggaaaaaccgggtatacggcagatgcgggctactgttatgtctgcgctgtaaaaaaagatgaccgtacatttatcgcagcacttcttggcagcggatggccgccgcataaaggttacaagtggtcggatgtacagacactgctggactatggcgacaagaattatcgttatcagactattgatatcagcaaaggagttccggataggcaggtacatgttatgaacggggaacatgattttgctaccgtgagagcaaaacagacaaattacaggttccttttaagttcggaggataaagtacatgtggagagcgtgcttcctggacagttggaagcaccggtggaggcaggacagccggtgggtagtattcaggtgtttgtgaatggtgatttgacggcggaaaacgattatatcacagcagacaggatcggtatcagacgtacctggaaagagcgattatggagaaaataagtacttgtctttactttcaaacaaaaaaaggatacaatattaggaagacaaaataaaaggattgacaggagcaagctttaaatggataagattgagataaaaaagaaacagggtagtattgtagaggcacttcgggatgccattttgtccggaagtatccctgcggacacggagatgacacagaatgaattggctcaaagtctgggcgtatccagaatgccggtgagagaggcgttgattattcttgagtatcagggattgattcgccggttgccgaataatcatgtacgggtagtgcctcagacaagggaatatatagcagaattgttccgtatgtgtggggatttatgtgtgccgttgctgtgtaagatggaacattcggagaaattgccggagcatgatccggactttcacagggcaatttatcaacagtgttcttttgctttccagaggaaagtgttggaatcgttgaccgaaatttatattacttatgcagctgccagactgacaacaaggggaacagagaatatcagagaagtcatacaggcggcagctttacgggatgaacaaaaggttcagcaggtgcttcaaagttattacgcggtcttgttagatggaatgatgacagattaaaggaaaggagagaataaatgctaggattaaaaccaattcagctgctaccggccagagaacgggtggcagcagctttaaggaaagcgattatatcaaaacagatttcagagggagaggtattgacccttgaaaatacagcccaggagcttggcgtatccattacgcctgttcgtgaggcttttcagattctggccagagatggtcttatagaattgaaacaaagtaaaggggctgttgtgcttggcattaatgagacgaccatccgggaacattatcaggtcagagcggcccttgaaagtgcagcctgtgcactttgctgcgagaatgatgcggatcttgaaggcatcagaaatgctctgaaagttgctgaagagtcattgaaagaaggtgattcaagcaattttgcggattataatcagtccttccattatgaaatctggaaagcatcaggtaacaagaagattcagaaaatgttggctgaattgtggaacggactttccatcggggcaaagtctacggtggaggagtatgcacatcgttcacacaaggaacataaagacatctttgcggcccttgaaaagcgggatgccggacaagtaagagagttaatggattatcatattcgcaggagcatggaggatgttctgacccgatatcaatagcaataaacgataccgaaagcatctttttcaggactttcaatgcgaaaataggtaataatcaataaaaaattaagataaagttttaacaaaatgccgaatcgcctcaaaatgctataaagcttattgacaggttcggtgttttattttataatacaaccaagaaatggatacattatcatttacaaatgataatgaaatgttataaggaagtgaggaggtactttcaatgagtccatcgaccataacactattatttctcctgttcgcagttgtcatgtttgtactggagaagattccgttgggggtcacatcgatgattgtctgctgtggactggttgtgacaggggtgctggatgtaaagactgcttttgccggatttattgacagcaatgtgattctctttgttgccatgttcattgtgggtggcgcattatttgagacaggaatggccaacaagattggcggaattgtcactcgttttgcaaaaacggagaagatgctgattatcgctatcatggtaatcgtaggactgatgagcggcgttttatccaacacaggaacagcagcagtgctgataccggttgtgatcggtattgcagcaaagtcgggatattcaaaatccagacttttgatgccacttgtttttgcagcggccatgggcggcaacctttccctgatcgcccagagtggtctggctgagattggtttatcattcggtttcttcgaatatgccattgttggtctgccgattctcatctgcggtgttatcttttatgcaacgattggttacaaattacttccggataagcaaggcggcgaagtcgctgtggaagaggtgagagactttagtgatgttccgaaatggaaacaggttttatcggttgttatcctgattctgacactggcagctatgatttttgaagataagattggcattaaactttgtgtttcaggctgtgtgggtgcgttagcactgattgttacgggcgttatttctgaaaaagatgctttaaagtctatcgatctgaagacaattttccttttcggcgggacattatctctggcatccgctttatcagaaactggcgcgggtgagatgattgcccagaaggttgtaggtgctctcggagacaatccttccccttatattttgacatttgttgtatttattctctgctgtgtgctgacaaattttatgtccaatacagcgacaaccgcattgatggttccaatctgtctctccattgcccagggcatgggagcagacccgagggctgtcctgatggcttgtgtcatcggcggttcatgtgcatatgccacaccaatcggcatgccggccaatacaatggttattggtgcgggtggatataccttcatggattatgtgaaggctggaacaccgatgattgtcattgcgacaattgtcagcatgattattcttccaatcgcatttcctttttttccttaagtgagatgaaatcggcaactgctgtttaaagttttaaaaatagcatcgctttaaacagttacaaataaaacacaatatctattctacatatttttttcaaggaggcattataaatgagcaaacaggcacaggtagaaaagcttacagattatatggcaaatttcgtgtcatatatcggcaaagtactgccggatgatatcatcgtaaaactggatgaactggcagagaaagaggacagtccgttgtctaagacaatttatcagacaatgaagctgaatcagaaactggcaaaggaattaaatcgtccaagctgtcaggatacaggtgtgcttcagttctgggttaaatgcggtacacaattccctctgattggagaacttgaagcacttctgaaggaagcagttgttaaggctacttttgaagcaccgctcagacataacagtgttgaaacatttgatgagtacaatacaggcaagaatgtgggcaaaggcacaccaactgttttctgggatattgtaccggacagtgatcagtgtgaaatctatgcatatatggccggtggcggatgtacactccctggtaaagccatggtcctgatgccaggtgctggttatgaaggggtgacacgttttgttatggatgttatgacttcttatgggctgaacgcatgtcctccgttgcttgtaggtgtcggcgtggcaacatctgtagaaacagcagctttgttatcaaagaaagcgctgatgagaccacttggcagtcacaatgaaaatgaacgtgcagcttctatggagaaactgcttgaagacggtatcaatgaaatcggacttggacctcagggtatgggtggcaaatattccgttatgggtgttcatatcgagaatacagcaagacatccatccgcaatcggcgttgccgtcaatgttggatgctggtcccacagacgtggacatattatttttgacaaagatcttaactatacaattacaacacattcgggggtgactttataatggtagagatgaaagatggaaagaagattttaacaacaccgatttcagcagaagatttagcagatattcatgttggcgatattatttacttaaacggcagcatgacaacatgcagagatgttgcacatcgtcgtcttgttgaagaaggccgtgaacttccggtagatgttcgcgacgcagcgattttccatgcaggtccaattatccgtcctctggaaaatgacaagttcgaaatggtttccgtaggtcctacaacaagtatgcgtatggaaaaattcgagaaggaatttgtagaaaatacaggtgtgaaggtgattatcggtaaaggaggtatgggtccgaacacagaatatgcctgcaagaactacaaagctattcattgtgtattccctgcaggaaacgcagttgtagctgcaacaaaggttgaagaaatcgttgatgcccagtggcgtgaccttggtatgccagaaacattatggcattgtcgtgtcaatgagttcggtcctctgattgtatctatcgatacagatggtcgcaacctctttgaagagaacaaagtaattttcaatgaacgtaaagaaaaggccattgaagaaatctgcaagcatgtaggtttcattaaataatactgttaaagcttcatattctgctgatgattgtctgtcggaggcagatatggagctctttgtattatttgcagaatatttaaccggattatgatataaaattacagtaactgttcagagctaacatccaaaatgctacgcttttcgtcggtgtggcgtatccgccaaataaaatttcaaaaacagtcttgaaaatgcaagcattttatacctgttttttgaaattttgcttggctctgaacagttaaaaattacaaaagatatagaatatgatttttgttttgttgataaattattgaaataatacaaaaattatcgataaaaatagtaaaaatatacaaatgtacttgaagcaatacaattagtctggtaaaataacagataagaaacggcaaaatttttgtcagttagagagaggatgagggcataattatgagtcaggtaaagacattatctgccagggaacgaattgaaggtttattggatgccggaagctttattgaaattggagcctctgttcatgcaagaaatacggattttaacatgccggagaagcagacgccggcagatggcgtgattacagggtatggcacgattgatagcaatctggtttatgtgttcagtcaggatgcatctgtgatgggcggcgccatcggtgagatgcatgcgcgcaagattgagaagatctatgaactggcattgaagatgggtgcgccggtgattggtatgtacgattgtgcgggcttaagattgcaggaagcaacagacgcactggatgcacttggaagattatacagacagcagacggcggcttcaggtgtaattccgcagtatgcagctgtgtttggtcagtgcggcggcggtacagctttgctggcggcattatcagattttacttttatggtgaaggacacaagcgcactttttgtgaatgcaccgaatacactggatgatagttgcggtgcagctgagcggtatgccggtgcagagtttcagggcagggagactggcaatgcggattttgtctgcgagaacgaagagatactgctggcacagctgcgtgagcttgtgctgatgcttccgtttaatcaggaagatgttctggattatgacgtatgcgaagatgatttgaacagaaagattgcagactattcaggaacaggtgatgtggcacaggtactgaaggatatcacggatgtcggcagatatgtggaagtaacggccggttatgccagagagatggtgacagcttttgttaaactgaacggacttactgtcggtgcagtggccaatagaacagagattctggatgagaatggtgaggcagctgaatcatttaacggcaagttgacaacagaaggacttcagaaagcagcagattttattcgtttctgtgatgcattttcaattccggtgctgtccctggtttctgcaaccggctttgatacaaccgtggccaatgaaaagagtgttgccagagaagcagccagactgattcatacttttgcggatgcatccgcaccgaaggtgacattgttgacaggtgaagcttacggcagtgcttatctgaccatgaattcaggacatatcggtgcagatcttgtttatgcatggccgacggcgtctgttggcatgatgcctgcagagaatgcggtaaagattatctacaatgatgagatagatgcttctgatgatgcacagggactgatcgcagagaaggcagcagcttatgcggcacttcagacgagccctgaatctgcggcaggcagagggtatgtggatgcggtgattgaaccggagagcacaagacagcatttgatcgcagcatttgagatgctttattcaaagcgagccgtacgaccttctaagaagcacagtacgctgtaattggaggcgctatctatgaagaagaaattaatggcttgtgaggctcttttgttgccgacgctggcgcttaccggctgtggttcacagtttggagataagatggtaagagccggaatgaatacattgatgggtatgggaacagtctttgttgttctgatattcattgcatttctcatatcaagatttaaatacatcagtcagctggagaactggtttagaaaccgtaagacgaagaatgaacaggcagttactgagactgttgctgaagaaccggcggcagatgagaaagaaattgatgaaacggatgatctggctcttgtggcagcgattactgctgcactggctgcatcccttgagacatcaccggataagttaatcgtccgttcaattcgaagaaaaaatacgaaccgctggtaggaggataagtaattatgaaaaactatattgtgaccgttaatggtgtcagctatgaagtttctgttgaggaagtaggagagggtcaggcagcagcgcctgcagccgctccagtgaaagccgctcctgtaaaggcagcagcccctgctaagaaggccaaagcatccggagcagcaggctctgtgaaggtttctgcaccaatgccaggcaagatcattgcagtgaagaaagatgccggtgctgcagtgaagaagggcgaagtcattcttgtccttgaagcgatgaagatggagaacgaaattgttgcaccgcaggatggcacagttgcatctgtgaatgttggagccggtgatgcggttgaagccggtgatgttctcgcaacgatgaattaatgtcactgttaatttaattcatctgtacgggaggcttcaatatggattatatttttacaacattaggaaatctcgtccatcagactgcatttttcaatctgacggtgggaaattttatcatgatatttgtggcatgctttttcctgtatctggccattggacgcggttatgagccgcttcttcttgtgccgatcgcatttggtatgcttctggtcaatctgtatccggatatcatgaaaactgtggaggaggccgctgcggacggcagtacatcagcgggacttttgcattatttctttctgggagacgagtggggcatatggccgtcactgatcttccttggtgtcggtgccatgacagactttggaccgctgattgccaatcctgccagctttcttctgggagcagcagcacagtttggtattttctttgcttatattggcgctatgtgtcttggatttgaagatgcagcggctgcagcaatctctattatcggcggtgcggacggcccgacatccatatatctggccagtaagctgggacaggcacatcttatgggaccgattgccgtagcggcatattcctatatgtccctggtgccgatcattcagccgccgatcatgaaggcactgacaacaaaagaagaacgttccatcaagatggagcagttaagaccggtatccaaactggagaagatccttttccctatcattgttactgttgtggtcgtactgattttgccttcaacagcacctcttgtaggtatgctgatgctgggtaatcttttcagggaaagcggtgtggttaaacagcttgctgaaacagcatctaatgccatgatgtatatcatcgttattcttcttggtacatccgttggtgccacaacaagtgcagaagcattcctgaattggacaaccatcaagattgtagcccttggcctgatagcctttgcagtgggaacagcatccggtgtcctgtttggcaaaattatgtgcaaagtaaccggaggcaaggtaaatcctctgattggttccgcgggcgtatccgcagtaccgatggcagcccgtgtttctcagaaagtcggtgcagaagaggatccgacaaatttcctgctgatgcatgctatgggaccgaacgttgccggtgttatcggtacagcagttgctgccggtgtatttatggctatttttggtgcataaggattcgacttttacgatgtatctgcagagcagacatggacttggcgccggtgtctgcgggcagattctgagtttgatatatgaatgataggagaatgaaaaatgtccgagattaagaaaaaacctgtgggtattactgagactattctcagagatgcccatcagtcacagattgccacacgaatgacgacagagcagatgctgccgattatcgacaagatggatcaggttggctaccattctgtagaatgctggggcggagccacttttgatgcctgtctgcgtttcctgaaggaggatccatgggagagacttcgtaagctaagagacggatttaagcatacaaagcttcagatgctgttcagaggtcagaatattcttggttatcgtcattacgcagatgatgtggttgagtattttgttcagaaatccattgcaaatggtattgatattattcgtatttttgatgcgtttaatgatctccgcaaccttgaaacatctgttaaggcctgcaaaaaggaaggcggccatgcacagatcgcgctttgttatacactgggagaagcgtatactctggattactggaaagaaattgccaagagaatcgaggagatgggggctgattccatttgtatcaaggatatggcgggcttgcttgtgccttatgaggcagaagcacttgtaaaagcgttaaaggcttctacaaaattgccaattcagcttcatacccattacacaagcggtgtcgcttctatgacgtatatgaaggctgttgaggcaggctgtgatatcattgatacagcgatgtcaccgttcgccctgggcaccagtcagccggctacagaggtgatgtgtgagacattcagggacacaccgtttgatacaggccttgatcagaaactgttggcagaaattgcagattatttcagaccgatccaggaagaagctttaaagagcggtctgctgaatccgaaggtgcttggcgttaatatcaagacactgatgtatcaggtacccggcggtatgctttccaatctggtatcgcagttgaaagatgcacatgctgaggataaatattatgacgtacttgaggaaatccctcgtgtaagaaaagactttggtgaaccgccgcttgtaacaccgtcatcacagattgttggtacccaggctgtactgaacgttctgatgggtgaacgctataaaatgatcaccaaagaaagcaaggccctgcttcatggcgaatacggtcagaccgtgaagccatttaatccagaagttcagaagaaagcctgcggtgatgagacaccgatcacttgtcgtccggcagaccttctgaaacctgagctgagggaaatggagaaagaggtggctcgctataaacagcaggatgaagatgtattatcctatgctttattcccgcaggtagccgttgatttcttcaagtaccgtgaggcgcagcaggagaaagtcgatcctacccgggcggacacgaaagccggagcttatccagtgtaggaaatagataaattggttcagccaatcgcgttagattattaacatgtaattggctgggccaatttgctttttgcgagcactcgtcaatcaatagtgctgaaagaaattgccgaacagggatgattttcagacaaaaaataaaaaactttaaaaaattagaaaaaagtactgtacaaatcagaaattcatgatataataacatcaacacgatgttaaagaattaacgaatgcttatgggagttgaaaatggttcaaaagtttttcaaagagtttcgttaatacgcacgtgacattgcagctttattaatattttatcatgttatgttattgaaagggagaacaagatcatgggagaaattgtaattgcaagtgcatgtagaacagctatcggtacatttggcggtacattaaaggatgttccagcagcagaacttggtgcaatcgttgttaaggaagcagttaagagagcaggcatcaaacctgagatggttgatgaagttattttcggtaacgtattacaggcaggtcttggtcagaatatcgctcgtcaggttactttaaaggcaggtcttcctattgagacaacagctatgacaattaatatcgtttgtggttccggtctgaagagtgttgctcttgcagctaaccagattcttgcaggcgaatctgaaatcgttgtttgtggtggtacagagaacatgagtgctgctccatatgcaattcctagtgctcgttggggcgcaagaatgaacaattctaagatgatcgacgttatggttaatgatggcctgtgggatgctttcaaccagtatcacatgggtatcacagctgaaaacgttgctgagaaatacggtatcacaagagaaatgcaggatgaatttgcagtagcttcccagagcaaagcagaagcagctatcaaagcaggcaagttcaaagatgaaatcgttcctgtagttatccatggcaagaagggtgatacagtatttgatacagatgaacatcctaaattcggcacaacacttgaaaaagtggctaaattaaaaccagctttcaagagagatggcggtacagttacagcggctaatgcttcaggtatcaacgacagtgcagcagctctggttgttatgtccaaagaaaaagctgatgaattaggtatcaaacctcttgcaacaatcgtttcctatgctacaggcggtgtagatccatctatcatgggtgttggccctgttcctgcagttactaaggcaatggctagagctaacatgacagttgatgattttgatctgatcgaagcaaatgaagctttcgcagctcagtctctggcagttgctcaggatcttaagtttgatatgagcaaggttaacgttaatggtggtgctattgctcttggccatccaattggtgcatcaggtgccagaatccttgttacattattatatgaaatgcagaagagagaagacgcccatacaggtcttgctacactgtgtatcggtggtggccagggccaggctcttatcgttaaaaaataattccttttcttctaacatacatagaggatgaaagaaaggctgtttcaaaacatgttttggaacagccttttcttcgcattattcacaaagaagtataagtttgtgtgcattctttgattacttgcgggaatgaaaaatctgtgttatgataaaacagactgatgaaaaaactggaggcaaatatggatacatcggcagatgtgctgcaattaatagaggaatcttataaaacattcagcaaaggacagagatatatagcagattatatatgtaataattatgataaggcagtggatatgacagcggctcgccttggaaagattgtcggagtcagtgaatcgacggttgttcgatttgcaacagagcttggctttaaaggatatccgcagttccagaaggcactgggagaacttgtgaaacagagattgagttctgttcagagaatttcactggcatacgagagattatctgagagcccggatctcatttcttctgtgctccataatgatatacagaatttgaaacatacggaagaaatgattgaccgggatgcattttacagggcggttgatctgattggggatgccaggaagatttatgtgatcggcgggagaagctgcagtacgcttgcttcatttttaaactattatctgagctatatctttgatgatgttcgattaatacgttcagacagtgtgacagaatcaattgaggagattcatcgtattggagagcaggatgtgattcttgcaatcagttttccacgttattcagtgaagacaatacagaccgtttcattcgccaagaaccgtaaggcgaagattatcgctattacagacggcgaacagtcaccattggctaaatatgcagattgttcgatttatgcaggcagtgatatggtttcctttgtggattcgcttgttgcaccgctcagtgttgttaatgcattgctggcagcgctgagtatgcggtataaggattccgtaacggatacaatgttgtctatggaatcaatatggaatacgatgaacgaatacgaacgcattgattaatgattcggatggagtctttttatgaagaaaataataattgtcggcggtggagccgccggtatgtttgcggctgtttcggcagcgaatgaatatacggaagttcatatatatgaacataatgagaaacttgggaagaaactctttattaccggtaaaggtcgatgcaatattacaaacggatgcgatgatgtggaggaattgctgagtcatgtcgtgacaaatgcacgatttttatattctgcattttatacattcagcaatcaggatatgatgcagttcctgactgaacagggactggaattgaagacagaaagaggccagagagtatttccggtttcagataaatcctctgatgtgatccgtacactggaacgtgttttgaaggacaggcatgtgcaggtccatttgaaacagcaagtctgtgatttgtggattgaagacaatgagataagagggattttcttgtccggcggagagaaggttgaagcagatgtggtgatcctggctgccggcggtgtctcttatccttcaacaggttctaccggagacggttatcggatggctgagcatgcgggtcatcatgtgacaccgagggtgccttcacttgtaccgatggttgtggatgatgcatggtgtacagaacttcagggactgtctttgaaaaatatcagtttttcccttcgatgcgggaagaaagaattttaccgggaattcggagagatgatgtttacacattttggcattaccggaccggttgtattaagcggcagtacccggatagccccttatctgaagaaaggcactgttacggctgagattgatatgaaaccttcattgaccgaagaacagttggatgcacggctgcttagggattttgataagaacatgaataagcagatcagaaatgcattgtcagaacttttaccgtccagtctgatacctgtgattatcagactttcggggattgatccttacatgatcgtgcatgatgtgacgaaacagcagcgccagaaattgattcatacaatgcgtcatctgactatgacggtgacaggtgtgcgcggttttaatgaggcaatcattacccagggaggcatccgtgttaaagaggtggacccgagtacgatggcatcgaagcttgtgaaggggctgtattttgccggtgagatcctggatctggatgcagttactggcggttataatcttcagattgcctggtcaacggcttatctggcgggcaggtctgcggcagaagcaatcacagagtaaaggaatgagaataatgagtataaatgtagcgatagatggaccagctggtgcaggaaagagcacaatcgccaaaaagcttgccaaggagctggactatatttatgtggatactggtgcgatgtatcgagccatggcattatatatgatagagcagaagacggacattcagcatatggatgctgtcagaagtgcctgtgatgcaatcacaatcgatatccgatacagcgatggtgaacagcaggttattctgaatggaaggaatgttaatgattttatccgtacggaggcagtcagtgagatgtccagcaagatttcggcaatacctgaagtgcgggctaaactgctttctctgcagcgctctctggcagctgcatcaaatgtcattatggatggcagagatatcggaacgcatgttttaccgaatgcggatgtgaagattttcctgacggcggatgcgcatgtgcgtgccctgcgacgatatgaagaatttacagcgaagggaatcaattgtaccttggagaatgttgaacgtgaggtcattgagcgtgatgaacgtgatatgaaccgggcaatcgcaccgcttaaacaggcagaggatgcggtcagagtggatacatcacagatgaatattgatgaagtcgttaattgccttagacagctgattcttgaccgcatttagaaggtgaatagaatgaagaatgttattttggcaaagactgcaggattttgtttcggtgtccgtcgggcggttgatatggcttatggcattgccggcagggacaaggtctacacgtatggcccgatcatacataatgaaacggttgttgaggatcttgaggccaaaggggtaaaggtggttcattccatcgaagaagcagctgcccttgcaggcgggacgatgatcattcggtcacacggagtatccaaagaggagattgatcttctgaaacagatgggatttgatattgtggatgccacatgtccttttgttaagaaaatccatcacattgtcgagaaatacagcgaacagggatatggcattattattataggcagtgcggatcatccggaggtgcaggcaatcagcgggtggtgcaaggaaccgccggtgattatcgaatctgaggaagaggcccggaattttaagactgatccggacaaaaaattgtgtcttgtatcacaaacgacatttaattacaataaatttcaattattagttgaaattatttcaaaaaagggttatgatataagatgtctaaatactatatgcaatgcgactgaggaacgccagtcagaagcccgggagatagccggacgcgttgatgcaatgattgtcattggcggaagacagagttccaatacgcagaaattatatgatatttgcaaaaacgaatgtaaaaatacttactatatacagacacttgttgacttggatttgaagacatttgaatctataggtaatgtaggtattacagcaggggcatcgaccccaaataatattatcgaggaggttcacaccaatatgtcagaaatgggtaatgaacagagttttgaacagatgctggaagcatcattaaaaactatcagaacaggagaagtcgttgaaggtaccgtcatcgatgtcaaagaagacgagatcattcttaatataggctacaaggcagacggaatcatcacgagaaatgagtattccaatacatctaatctcgaccttagaacagttgtcaatgttggcgatacaatgcaggctaaagttctgaaagtaaatgatggcgaaggtcaggttctcttaacatataagagactgctggctgaaagaggcaacaagagaattgaagaagcttataacaacaaggaagtacttacagcaaaagttgctaacgttcttgacggtggcttaagcgttgttgtagaagaagcaagagtatttattcctgcaagccttgtttccgatacttatgagaagaacctgtccaagtaccaggatcaggagatctcttttgtaatcacagagtttaatccacgcaagagaagaatcatcggtgacagaaagcagctgatccttgctgagaaagctcagaaacagaaagaattattcgaaaagatcaatatcggtgatacagttgaaggccgtgtaaagaatgtaacagattttggcgcattcatcgatcttggcggtgcagatggtctgcttcacatttctgaaatgtcatggggcagagttgagaatccaaagaaggttcttaaagtcggtgatacacttaaagtcctgatcaaagatattcagggcgaaaagattgcattaagcctgaaattccctgaaacaaatccatggcttacagctgctgataagtatgcggtaggcaatgttgttgaaggtaaagttgcaagaatgacagactttggtgcattcgttgaacttgaaccaggcgtagatgcacttcttcatgtatctcagatttccagagatcatgttgacaaaccatctgatgttctttcatatggtcagacaatcacagcaaaggttgtagatttcaatgaagaatctcagaagatcagcctgagcatgaaagcacttgatgcaaaggaagaaactgaagaataaattatcatttatgatttcaggagaggctttgcctgctgttggcaggtaaggcctcttttttcaaaaggaggttttatatgcagccttactatgcgataaagttaaaatgctttgtattacgcttgatgatgggatgctcactgttgttgatttcagcagggattgtcgtctctattttgcaggaagtcatgaacagttatgatgccaacagcagacttgcatatatattaggactgctgatctgcgcattgatggttgcgttgggaactgtgctgatttatcaggcttttcattttgaaagattcgtttttggacgaagtcagcgaagttatgatctgttgaagaaagatatgcaggacaagtcagtggtcagtgcaggcaatctgattgtaacggatcagtttatgctactcttttccaagcatatttttaatatgtgtaaggtgatacggctggagaatgttattgcctgttttgaagatcctgtttatggaactgttgcaaagccttcagaatatacactgtatatttatgaccgggattttaagtgccataccattgtattggatgcgaagcaatcagagaccggacaccaggcaaagcagaagatttgtcagacacatccgtggatttatgcagtcagtcgtgatacttttcttgatcgcacgatgtctaaaaacagcagaagaaattttctgaatcagattgagaagagaaagtatgaaatgaattccacggtcaatgtggataaggaggctgaagcagaaattgatcagatggtcaatgatgccagaaagaagctggattttcactccatcctcggcaaaaataaaaaagatgcagaatcgaagaaaaaataaaagggcacaaagcccttttatttttgctttttaaatcatacggaaaaacggtgttacacagaagcaacttctttgatgagagaggatatataagacctgagaaatgccgggtcagatgtcaatttttctgtatcacacaggatatacagctgcttgtcatcgaagcttttcttgaaagtaggctgcagtgaagtgtcaaaagatgggaggaaaatcccctcctggcggatgtaacaggtggctgcggttgctttttgacggtatgctttatcgacgtaacaggcaatagagcgatggatggcacggtcttctttgggaagataataatagtctttgacggggcctgggagaaaatatttcaattcaccggataaaaccggaatgacaagatgtgccgtatctttctctaaagagagagaaagcagagcattcgacagttggaccctttgggggaccggtgtctctaatatgagagcaaggtgacagaaattctcttctaacctgcaaagatgtactttggcaaaccttcctctgaaaaattgtgtataggcagagagtgaatggaggtggagtagtccgatcatatccgcttcatgatgggacttcagctgtaaaagcagcgtatcttctttggaaagctcccatgatgtatagcatttaaccaatgcttcaggggcaagatgctcaggacgggtatagcgaataaaggcttcagcggtggcttttcgggtgttttccagagaaagcagatgcctgaaaggagagatatctttttgaatatccagctgtcggacgctttgaaagagtgtcagattagcagtatcttcgctggaaaaacagtcggcgtcgctgtaattgcgccagcggttgttgagaaagcggtaagtaaaactgtgaccgccataggtgagtacctggctgaaattctcaagtatctgttggaaagactgcatcagttcacgctcatccattttcttttcggccagcaggcattgaaaatgccatcctttttcttcctgccatcccagtccgatcataaacacaaaagcgttcctgggggaaagaccggttgtctcgatgttcagaagcagcgtctgatcagtaatatgtatgtctgatggataaaatgtatcaaatgtaagcataatagatcctcctgacgctatcttatcataaagagacatagttgaacagcctttatcgactgaacagttgttttgtgtttggactggactgaacagttgttttgtggtatgatgattttcgaagaggtgaaatgagtgatagcgtttattcagggagaattatgtgatgccggccaggatacgattgttgttgcctgtcatggtattggctatgaaatacagatacccgtgtcggtagctcaggtactgccggatccagggaatgttgttaagatatatacgtatacttatgtgagagaagatgcattgggattatttggctttttgacgcaagatgatctgaaaatcttcaagctgctgatcactgtcaatggtgtcggaccgaaagcggcattggcaattttgtcagcgatgacagctgacgagctccgttttgcaatattagcggaagatgccaaggcaattgccaaggctccggggatcggaccgaagacggcgaagcgaatgattattgaattgaaggacaagctgaatcttgaatccatgatcgaaggtcatggcgatgcagagatgagtctttcggaccctggcgatgcggctgcgaatgttcgggatgaagtcattatggcattgacagcactgggctatggtaatacggaggctgttcgtgcggtgcgtgctgtttcaggggcagatgagatggacagtgagacgcttttgaaacaggctttgaagaaaattatgatattttaggtgagagacaatggcaaaacgaattattacaaccgagtttgcagaggaagatgtcaagatcgagaatcatctcaggcctcagcttctgaaggattatatcggacagcagaaagtgaaggaaacactttctatttatattgaggcagccagacagagagaagaaccacttgatcatgtcctgttctatggacctccgggattaggaaagacgacgttggcgggaattattgccaatgaaatgggcgtgaagatgaaagtgacatcgggaccggccattgagaaaccgggtgagattgctgctatattgaataatctgtcggagggggatgttctcttcattgatgaaattcatcgcttgaacagacaggtagaagaggtcctttatccggcgatggaagattttgcaattgatattgtgattggcaaaggcgcagctgcaagatctatccgtctggatcttccgaagtttacactggtgggggcaacgacaagagccggactgttgacggcgccactcagagatcgttttggtgttgtcagtcgtctggaattttattcaacccaggatttaatgacgattatcaggcggtcagcagaagttttacatgtgaagatcgatgagcggggagcagaggagcttgccagacgttccagaggaaccccgcgtctggccaatcggctgctaaagcgtgtgcgcgattatgcccaggtttgtcacgatggtgtgatcacgctgcaggttgccaatgaagcactggatcttctggatgtggataagtatggtctggaccagtcagatagaaacattttgctcaccatgatgaataagttcagaggcggaccggttggtcttgatacactggcggcagctcttggagaggattcaggaacattggaagaggtgtatgaaccatatctgatcaagaatggatttatacagagaacaccgcggggaagagttgtaacagaacttgccagagctcactgcggaattccggctgatgcgtcataacaggagacaatgcctgcttgaaggacttgaattaagacttgtaattccggttaattcgtttataatggtaacagacgggattgggtgacaatgaaccttgtaaggactgaagataaaaggaggatatggaatggcatcaaagacagatgttcaggttttgctcggtggaaaggtctatacactgagcggctatgagagcgaggaatatcttcagaagattgcattatatatcaacaataagatgacagagcttaatcagatgccgggatataagcggatgggcagcgatatgcagaagactttgctggagctgaacatggcagatgattattataaagcaagaaaacgaatcagcgagcttgaagcagatctggaagataaggataaggctgagtatgatctaaagcacgaattgatctcagcacagattcagttggatgaatccacgaagaagattgatcagctgaaagacgagattaatgaacttcagaaacagattgtaaagcttgaggcgaaggccgaacgccagaatgattaatcggctttcttgacgatgtaaaaagggttgctgtacggattcagtagtgataagttgcggcgccctttcttttttcacggcaggacaggagatagagaatgagagaaatagaggtactggcaccggcaggctcttttgatacgatgaaggcggcctataaggcaggcgcggatgctgtgtatatgggcggaccgatgttcggcgcaagagcctatgcagataatgcggatgcagggcagatgctgtcagcgattgactatgcgcatcttcatgggcggaagctttatatgacggtgaatacacttttgaaaaacacagaaatagaagggcagctggaagattatatccggcctttttatgaacagggactggacgcggtcattgtacaggatttgggcgttatggaaatgatccatacactttttccggatatggcgatacatgccagtacacagatgacagtctgtggaacggattacggcaaatggctcagagatcatggcgcatcaagaattgttacaccccgtgagctggatttatcagaaattgcggatatgaaacagcagacaggggtggagattgagacatttgtgcatggagcactttgttactgctattcgggacagtgcctgatgagcagtatgatcggaggaagaagcggtaatcgcggcagatgtgcacagccatgccgccttccatggacctttcgttcggacagcagggagaagagcggctatcttctcagtccgaaggatttgtgcagcctgcagctgctgccggatctgattgatgcaggtgtggattctctgaagatagaaggccgcatgaaaaagccggaatacgcagcactgacagcttatttatatcgcaagtatacagacctatatctgacaggtgggcgtgaacattatcatgtggatcaggcagatctggagcagttaatggatctgtataacagaggcggtttcacggacggctatttttacaggcacaatgggcaggagatgatgtcggttaaacgtccgaaccattcgggcttgaatatcggacaaggaagaataaaccgcaggggtgaaatggagatacagcctatgaaggccctgggagcgggtgatgttctggaattgccggatggacagtcagtcaaactggacaaagctgtttcggtgggtggacagctgaaggtgaagtatacaggcaaaccatttaagcagacatgttccgttatgagaacacgaaatcaatcgctgatccagtcggttaccgagcagtatgtcaaaaacagtgacctgaaagagaagctttatggatatgtaagtatttcgaaagatttacctgctagaatagatgtatattatagagatatgcatgtctgcagtgagggagcgattgtccagccagcccagaagcggccgcttacagaagaggagattcgcaggcgcctgatgaagacgggggggacaccttttgaattcgatcagttggagattttccttgaagaggactgctatatgacggtccaggaattgaaccagtttaggcgtgaggcgcttgatactgtggaaagagccgtactgacaccattcagaagacagcagccgtcgattttacagtcgtcgaatgatagcagaaagcgagaaaagagacctgtatccatcagtgttctggcatcttcaagagcacaggtgcttgcagcatcaaaggtggatggtatcagccgcatttattttaattacgaaggcaatgacaatcttgcagttgaagcagctgctatgacacatggtgcgggcaaagaattctatctggcaatgccttatattttaagaaatgatacaaagaagcagtgtctgtctaaaattcagaagctgaagtcaacgacagacggcttcctggtgagaaatatggagacgctgctgatgctgagaaaggcaggatttgaccaaccgtgtatatcggattataatatgtattgtatgaatgacagagccggccgtgtatatgagcagatgatggatcagatgaccttacctgtggaactgaatcgaagggagattgcaggacttctatctgcggtgaacagcgagatgatcgtctacggatatcagccgcttatggtgtcggcacaatgccttatgaagacaaccggcaaatgcaccaaagaacccgggtattatgaactggaagatcgcagacacaagaagtttctggtgcataatgtctgcgctttctgctataatcttatttacaattcagtgccgttatacttaatggatgtattggatgaggcaacggaaagtggtattggcggtgtacgccttcaatttgtcaatgagacaggcgatactgtcagagcaatggcagaagcatgcatccgtgcccttcagggagaacgggtgacagctgccggagatttcacgaaaggacattataaaagaggagtagaatagggacaggatggttaatgttattacgcagttatttaagtacatggttgcattgatcatggcgatttatacgattcgctgttttacggttttcagtgtcaaaaaagaaaagaaaaagcgaaggatttacagaagccagaattttctgatgctctggattcatctcatgctttatacgattatttttctgaatgagaaatccatgtatgtacttgtcttttacggcgcacagctgtgtttctttattgttgcgttgtttatgtacaacaatatttacaggaatgcgtcaaagcttttgatcaacaatatgttttttctgatgatgatcggttttgtaatgctgacaagactggacatgacacttgcagtgaagcaatttttaattgctgttgcatctgttgccttcagtctgacagtgccggtgattgtggagaaagtcggttttttgagcaggctcggtattgtttacggcattatcggtctcggagttgttggttccgtatttatttttggtacaaaggtttatggtgcgaccaactggatcagcattgcgggtattggttttcagccatcagaattagcaaagattatttttgtgttttttgtagcagctatgctgtataaaaacaccagtctgaagcagattatgttcacctccgctctggcgggagtgcatgtgctgatgcttgttgttgagaaagaccttggtgcggcagttattttctttgttacgtatattgtgatgctttacgtggcaacacgtagagccatgtggccgcttatgggccttgcggcaggagccggtgcttctgttgttgcttatcatctgtttgaccatgtcaaacgaagagttgttgcctggaaggatccttggggcaattataacgatgctggatatcagatcgctcagtcactgtttgccatcggaacaggcggatggtttggcatgggtctgtatcagggaatgccaaaggatattcctgtaagggaaagtgactttatttttgcggtgatcgctgaggaactgggtggtttttttgccatctgtcttattttggtatttatgagctgttttattatgttcattaatatttcgctgcgtttgactaataatttctataagcttctggcaattggcctgagcattgcatatggttttcagctgttcctgtgtatcggtggtgttatcaagtttattccgcataccggtgttacattgccactgatcagttacggcggaagttccattctttccacaatcattgtatttgcagtgattcagggactttatctgttgaaacagaaggaggtgaaagagattgaagaaaaacgacgagaatcagaacaacgacagtggaatgaccagacgcgtgtataagaaggccagtctggatgataccgttgtcaatgtcaggaaagattcatcggatgactttgatctgctttcggatgatggaatgatggactatgtgccgggtgtggatgatgtggatcattttgattttgatgagaaggatatcgaacactaccgcaaggtcaatgaacaggaagcggctgagagagacagacgcaggaagcagcgtgcgctggagaaacagcgtactgctcagaaacagcagtgtgaaacaaagaaatcagatgaacagccgcagggaaaaagacagaataaacaggccgctaaggctgttgcagacgaggttcctgtgaaaaagacaaataccaaaaagaaaaaacgccgcagaagaaaagatgaagagacggatattgatgatatagaactgcgccgtgaactcagtgaaaagaaacgcacgaacaaagagatcatgcgtattacgtatgtgatgatgctgcttttcttcggaatgatcggttactttatttattttgacggcgtgacaagcaaggaagttattaataatccgcataacagccgtctggccaagatggcggacagtgttgtcagaggagagattctttcagcggatggagaagttctggcagaatccatcaaggatgacaatggcaattattaccgttattatccgtatggatgtacatttgcccatgtggtgggaacaagtgatgtgaataagtccggtgtggagctgacagccgattacaatctgattacgtcagatatccagccagtggagaagattattaatgagatcagaggtcagaagaatccggcggataatgtggtgacaacattaaatgccaatctgcagcaggtggctcatgatgctctgggagacagggagggcgctgtagtggcaatagaaccatccacaggtaaggtactggcgatgatttcaaaaccggactacgacccgaattcactggttgataattatcaggacattattagtgatgagaacagcaaagttcttctgaatcagtcaacgcagggactttttgtaccggggtctatattcaagatggtgacgtcattggcatatcttcgcagcggcggtgacccggataattacagctattactgtgatggttcgatttcactgcagtctgacagcggtgacagctatattaagtgttatgacggtgaagagcatggacaggtggatctgcttgaatcttttgcagaatcctgtaatgcatcatttgctaatctggggctatccatcagtgtagataaaatgaatgaagtggccaattcgctgctgtttaatcagacactgccaacgaagtttacgacggctaaaagccagttcagtctgtctaacacagacagccagtggcagattggtgcaacggctattggccagggcaatacagttatttctccgatccatgcagctatgctcgtcagtgccattgccaacggcggaacattgatgaagccgtatgtgattgattctgttcagagcacggaaggttctgtgattgaacaatatgaatcagagaactatggaacgctgatgtcagcttcagaatcttcacagctgaccaagatgatgaaggcggttgttgaagagggtaccggttacaaactttccggcaagaattactctgttgccggaaagacaggaacagcggaagttgtcggaagaggcaacaatgcctggtttgtcggttttgcaccggcggatgatccgaagattgccatctgcgtattggtggaagatgccggaacagccagcagcgaagcggttcctattgccggagagatactggatgcttatctgaataattaaatggacaggtattcctttacaaacaacaggttaaattcctgtgatattattgtaaaatacctcaaagcattgtatactaatagatagaatacttgattgacacaccaatgagcagggaggaattgcgatgacaaaggcaacgagctgtggcggtgtggttatattcagaggtaaaatccttctgctgtataagaattacagaaataaatatgaaggatgggtgttaccgaaaggtactgttgaggcaggcgaagaatttaaggaaacggcactcagagaagtgaaagaagaaacgggtgtagacgcatctattgtgaaatatgtaggcaagagccagtacagcttcaatacatcccaggatgtggtgatgaaggaagtccactggtatttgatgatgtctgacagctatttcagcaaaccacagcgtgaagagtatttcgtggattcggggtattataagtatcacgaagcttatcatttactgaaatttacgaatgagaggcagatccttgagaaggcttacagtgaatatatagaattcaagaagagcaatctctggggaagaaaaaagtattattgatctatctgtcctgtggacggagcacaaaagaggggatgttgtaaaatacggagaggttgcagtaccttttccgggtatgtcattttacggcatcttcttttgttttatttgcagaggggaatgaaatgctgagagaagtcgatttaaataaaaatcttaccaaaaaagaatacaaagaaatgatggataaactggcgccgaagtttgctgcgcttcagcgagaagcgcgggctaagggtttgccggtgatggttgtttttgaaggatggggcgcatccggtaagggaacgatgatcagtcgcctgatacagccgctggatccgcgtggatttaaggtatttaccattcaggcagaaaatgaagaagagcatatgcatccgtttttgtggcgtttctggacgaagacaccgtcgaaggggcgtatgcatatttttgaccgaagctggtatcggcgcgtgatcacagaacagatggatgcgccaatggatcagaagcgcctggatgctgcgtatcagcagattctttcattcgaggaacagctgtcggctgacggaacattgatcatcaaatttttcctgcatatttctgctgatgaacaggagaagcgtctgaagaagctggaacgttcacttgagacgaagtggcgtgtgaccaaagcggactggaaacattttaagcagtacaaggcgtatctgccgatgtatgatcatatgctggaacagaccgatatgtcatgggcaccatggcatgtcattgaggcaacagacagggaatatgcagcagtgaaagtcatgacaattgttgccgggatgatagaagaacgtttgaatgaagagaatgcaaaagagagccgcagtcatttggcagagagggcgcaggaagaattgccgggtacggaagagacaatgcgtacaacggttcttgacggtgtggatgtcagtctgacaatgacaaaggaagattacaagaagcgtttatctgtgctgcagaaagaattgacccgtctgcagaatgagatgtatctgaagcggattcctgttgttgtggctttggaaggctgggatgcggcaggaaagggcggtgcgatcaagcgtttgacagagcctctggatccgcgcggatacgaggtggttccgacggcggcaccgaatgatatagaaaaggcccatcattatctgtggcgcttctggcgagccatgccgaaggatggtcatatgacgatttttgatcggacatggtatggacgtgtgatggtggagcgtattgaaggcttctgtagtcaggcagaatggcaccgtgcatacagagagatcaaccagatggagcagaatttgacggaccacggggtgatcgttctgaaattctggcttcagattgataaggatgaacaggaacgacgttttaatgagcgaatggaggatcctgagaaacagtggaagattacggatgaggactggcgcaaccgtgagaagtgggatgcgtatgtcaaggctgtcgatgagatgatcttgagaacttctactacctatgcaccgtggacgattgttgaggctgattccaagtattatgcaaggattaaggtactcgagacggttgtccgagccttaaagaatagaatctgatttctgacgtagaaaaataacacaagaaaaagtgatttatccattgcattttgttaaaaaatattgtacaataacaattgcatctgtagctcagtggatagagcaacggtttccggagccgtgtgcgagggttcgattcccttcaggtgtatttttttaacagaattcgcagaatgattctgcagtgctgcagatgaatgttcaggaatgaaagcatcgttatgatgaataattgtatggaggaatagaaaggaatgaaaagtccattaggagatagagagagcagaagaaacagttctgccggtgaggagaatatagctatgaaccgaaacagtatattgattattatattatcggttgttgtcgttgttgctgccattgcaggtctggtgatgaaccttggaagcaaggagaataaagggacggccgccaattccggcagcttgactgcagaatcaaccatcagtgtcgatgagaataccaatgcccttcaggagaatcagtatcctgcagtgaatgaactgattgccaattaccgtaaggcatttaaagagagtgacacagatcttctgaagaaggtttataattctgatcaggagatcaatgcagatgtattgacagcaacttcgcagattattgaggattatcagaatacgcagtattataccaaacgcggtctgaattccggagaatatgttgtttttgtatatgatgagctgaagttggcagatattaagacactggcaccgaatctttccgtattttatgtgaagtcagcggatgatggaacattgtacatttatcgcggtgattataatgctgccacaggttcttttcagtatgatgaggacactcagaattacatcaatcagctttaccaggatcaggatgtcatggatcttatttctacagtgaataccaagatggacagtgcctgtgcgaatgattcaagcttgatggaattcatgcagaaggtgcgctctaagacaagtgtaacgaattcagcatctactgataccagcgatacatcttcaactgaatcaggacagtcagagactgaatctgcagcagagactgagtcggccggtgagacagaatcacagacggacagtagtacagctacacagaactaattagatgaacgaatgataaaagcttttgctggaggtgtctgcagcaaaagctttttttgtaacagaggtatagaaatgagtaattttaaaaaggatatattacatgagaatgaagacaaatcagatgttcgtcttaatcgtttcctgagtgatgcgggtttttgttccagaagagaagcagatcgtctgattgaggcaggacgcgtgacagtggatggcacgaaggctgagcttggtacccgggtgaggccggggcaggtggttaaggtaggatcgaaggttgtcagacaaaacgacaggatggttttgatcgcttttaataaaccaaggggaattgtctgtacaacagatagagtccgtgagaagaataatattatagattatattcattatccggagcggatttacccgatcggacgtctggataaggattcggagggattgattcttctgacgaatgatggtacaattgtcaatcatattctgaaggctagtcagtatcatgagaaagagtatattgtccgggtgaataagaagataacagatgaattcattcagggcatgtcaaagggcgtgccgattctggatacggtgacacgtccgtgtacgcttcggaggatagatgattacacattttctattattctaacacaggggttgaaccggcagattcggtatatgtgccgacattttgattaccatgtaacgaagcttaagcgggtccgtattatgaatatccgtcttggcagtctgccggttggaaagtggcgggatgtaacagcggaagaacttgagcagctgaaaagacagtttattgcaaataatcgcaggaatcagtcgaagcggagaaagcgtatataaaatcagatagggtattggagaaataatatatgaatagagaagaatataatacgctcattaaaacaatcaattatcatatgaatctttattataaccaggatgaatcagaaatcagtgactatgaatatgatcagttgatgcttcaattaaaagcagctgaaaaagaacacccggaatgggtcacatcggattcgccatcgcaaaagattggtggaactgcaaagagggaagctggtgttaaggtaacgcatgatgtgcctatgctttcaattgaagatgttttcacaaaagaggatatcgttgcctgggtagaaaaggttaaggctgttcatcctgaatgccaattttctgttgaaacaaaaattgatggcctttcaatgactttgagatatgaaaaagatgaaaatggtttgttaagattgtctttggcggaaactagaggagatggacttgttggagaggatgtaacagcaaatgcacttgttgtaccagatgtaaaaaaatatttaaagttgccatatgatgcattgcaacttcgaggagaagtctatatgtctcatagtgcttttgaaaaatataatgatgaacaggaaaagacaggaaaaaaactggcggctaatccacgaaatctggcagcaggtacattaaggcaactgaatccagcaattacaaaagagcgcgggttaaagatgtttgtgtttaatgttcagcaaggaccggaagaagtgatggaaagccattgtgatgcaatggattttttatcagcaaatggtattccgacggtattccataaaaaatgcacaacggtggatgaaattattcaggcaattgatgagattgcagaaatgcgtgataaactcgaatatgatattgatggtgctgttgtcaaaatagaccagattcagtatcgagacgacttcccggcaggaagtaaatattccagcggtcatattgcttataaatatcctccagaagagcgtgttgtcgtgatggatgaaattctggtagatgtaggacgaacaggaaagataacttatacgggcgttttccatgatgaagaaacagaaaaaccagccagactttgcggaacgaatgtttcaagagcgacacttcataatcaggattatattaatgagatgaagattggcattggaggctcatataaattatttaagagcggagaaattattccaaagttaaatggatgtgttaagacgccaaaagttgtttttaaaacgcctacgcgctgcccagtatgcggcagtgggttgataaatgaagaagatacggcagatatccgctgtgtcaatgtgttatgttcagcacaattggcaagaactctttcgtatttttgttcacttgatgcgatgaatattgtaggactgggagattctattattgatgcattaatcaaaaatggttatgtgaaaacctttgcagatatttacaaattaaaggatttgaaggatgaactgattagaaataatatatttggcaaagaaaaaggaacaggcagagtattggaagcgattgagaaatctaaaacaaacgatcctacaaagttgctgaccggacttggaataagaaatgtcggaaagaatacagcaaagtcaattatgaagcatttttcttcaattgaagaattgatgaatgcatcatacgaagatttaatagccattgatgatattggcggggttacagctacatgcatcaggcagtattttgataatcccaagaaccgtacagttatagatgaactggagtctgtaggtgttacaatgaagatgccgaaaggatcaacttctagtgaaaaactggcaggattaacaattgttgtgacgggtgttttaccaacccttggtcgaaaagaagcttcagatttaattgagaataatggcggtaaatgtacaggctctgtaagtaagaaaacagattatctagttgcaggtgagaaggcaggaagtaagctgacaaaagcacaggctttgggaattccaataattacagaagaagaactgttgaacatgatttcataaagaggaagcttgtttgaggatcgtattatttgggaatagtagctttataatttataaatatattcagatgaatcgtgggaggctttatggcaacgggatttatacagctaaatgagaatgacacaaaagagttaagaaaagaaatcggcttacctgttacaacttctgaggattattcaatatcgaatgtcaataataaagatgaattagttgaagttggtgatttagatgaagggtggcagggaaaactcctatcgaagttcgggaaacttgaaagtgagtttggtcttatggaacattccttttctattatggcaaatgctggaaaagatggaaaaatatcttcttacgcaatttgtgtttatgaaccggaccttgttgaagacaggagagacagcagtaggaatacggtccttgcgagagtgaaagaagatgtcctcaagtcaaataccgatatcgttgaagtatactcaaagtactttggaaaaaatgacgagaaaaaaagatatgataaggattcggatgattttattaattgcctgatggaatgtatgcgatttggcattaataattatattccaaaggccgcgggatttgcgtgctgttctagatataaggaatgttctgatgcaaaggaatgtattcatccgaatcggctttatgcaaaagcatgtcaatatcgaaagaatctggaagaaggaaatattttttattagatgagatatttaaatgattctgaataagtacatttccctaccaaaatagtatgaaaaagacttgacgaatatgtgatgaaatgttaagataaaaaggcaagttttcattaaaaatgcgggacatataacatagagaataattatgcatatatataagagacggggagagtttctgtcccctcgctttggaaatatgtcaccaatgattaattttgaataattgaaggagatgagcaaaatggatcatttagtttatctggatcatgcagcaacaactgctgcaagacctgaagtcgttgaggccatgctgccttactttacagagaaatacggcaatccatccagtatctacagtttaggctcagaaacaaaggcagctattacacatgcgcgtgagattatggcgaagtccatcggtacaacgtctgagaatatatattttacagccggcggcagtgaatcagataactgggcacttgttgcgactgctgaagcatatgcttcaaaaggcaagcatatcattacatccaagattgaacatcatgcgattctgcatacatgcgattatctggcatccagaggatatgagatcacttatattgatgtcgatgagaacggtgtgatcaaactggatcagctgaaagcagctatccgcccggatacgatcctgatttctgttatgtttgccaacaatgagatcggaacgattcagccaattgaagagattggtgctattgcgaaagagcatggtattttattccatacagatgccgtacaggcttattgtcaggtgcctattgatgtagacaagatgcatattgatatgctcagcatcagtggtcacaagatcaatggaccgaaggggattggattcctttatatccgcaagggtgtgaagatccgctcatttattcacggcggtgctcaggaacgtaagcgtcgtgccggtacagagaatgttccgagtattgtcggtcttggcaaggcagttgagatggcagtggctgatatggaagaacgtacatcgaaggaaatcgaattaagagaccgcatgattgatgccatttataagagaatcccttatgcacgtctgaatggtgacagaacacgcagattgccgaataatgtcaacttcagtttccagtttgttgagggtgaatccatgctgatcatgctggatatggcacatatttgtgcatccagtggttctgcctgtacatcaggttccctggatccatcccatgtccttctggcgattggtctgcctcatgagattgcacatggttctctgagactgacactgggttatgataatacacaggaagaaattgacggtgttgtagatgaaattgagaagattgttgcacgtcttcgttccatgtcaccgttatatgaagatttcatcaagaaaacaggaggaaataaataatgtacagcgagaaagttatggatcatttccagcatccgcgtaatgttggagagattgaaaatgcaagtggtgtcggcacagtaggcaatgcgaagtgcggcgatatcatgagaatatattttgatattgacgagaaccaggtgatcagagatgtcaaattcaaaacatttggctgcggcgccgctgttgcaactagcagtatggcaacagaacttgtcaaaggcaagacaatttatgaagcgttggaagtaaccaacaaagcggttatggaagcgcttgatggtctgcctccggtcaaggtacactgttctcttcttgctgaagaagcaattcatgctgccctttgggattatgcagaaaagaacggcatcaagattgaaggcctccagaaaccgaagaacgatatcagtgaaggtgaagaggaagaagactattaatgaatgataagggaggactgctgcgttatgacagatgatgcggcagtccttttgttacatgagaaggaggatgcatatggcatcgaaaaaggttgtagtaggtatgtccggtggtgtggattcttctgtagctgcctggctgctcaaacagcaagggtatgatgtgatcggagtgaccatgcagatctggcaggaagaggaggatgaaatcgtcgaagaaaacggcggttgctgcggtttatctgcagtggatgatgccagaagagtggcggagagaatcggtataccgtattatgtgatgaatttccgggaagtgttcagagagaaagtgattgacaattttgtttctgagtatgaaaaagggcggacaccgaatccatgtattgtctgcaatcgttatgtcaaatgggaagcactgcttgagaaggcattggctctgggtgccgattatattgcaacgggccactatgccagaatcgttcatcttccaaatggcagatatgcgattgaaaaggcagcatttgacagaaaagatcagacgtatgcattgtataatctgaatcagcatcagctggcgcataccctgatgccggtaggggcttatgataaatcagaagtgcgtcgtatagctggggaaatcggtctgtctgtggccaataagatggacagccaggatatctgttttgtatcggacggcaattatcaggcgttcattgaagattatacaggcaaaaaactgccggaaggtgattttgtagacaagaatggcaaagtgctgggacatcacagaggtatcggtgcttataccattggtcagcgaaaggggctgaatctggccatgggacatccggtttttgttaccgatattaatcctgaagaaaacaaaatcattatcggtgagaatgatgaattgttccaacgggcattgtatgcatctaatgtgaatctgatgtcccgtgcgtctttggatgaaccggtgcgcctgacggccaagatacgttacgcccacaaagcagcaccgtgcatagccagacagttgccggacggaagtttatatgtatgttttgatgagcctcagcgtgcgatcacaccgggccaggcagttgttctgtatgacggagatcttgtcgcaggcggtggaattatcgagaaaattgcgccggaattagatgatgcgagttaaaagattgtcaaatctggatagaactgtgtgtataatcctggattttttgcaaataatgtacagatgtaaaaacaaaaaacttcaatttgcgaaaaaatcatgaaaattatgcagtaatctgcatcaaattataaggattgttaaaaaattaataaagtggttttttgtacttgaaaaaaacattaaaatccgatacaatagggacagagcgaaagtggtaagaaaattctttaagctttcggtaaaataataaaaatgatatacaatatcaggaggagttattatggcagtaaaagtagcaattaatggatttggtcgtattggtcgtcttgcattcagacagatgtttgcagcagaaggttatgaagtagttgcaatcaacgatttaacagatcctaagatgcttgcacatcttttgaaatatgattcatctcagggcagatatgccggacatacagtaactgttggcgaagacaacgcatctatcgttgttgacggcaaacagattacaatctacaaagaagcagatgcttctaacttaccatggggtgacctggatgttgatgttgttcttgagtgtacaggtttctatacatccaaggcaaaagctgaagcacatatcaaagcaggcgctaagaaagttgttatttctgcaccagcaggcaatgatcttcctacaatcgtatacagcgttaacgagaagacacttacagctgatgacaagattatctctgctgcatcctgtacaacaaactgtcttgcacctatggcaaaggctttgaatgattatgctccaatccagagtggtatcatgtctacaatccatgcttacacaggtgaccagatgattcttgacggaccacacagaaaaggtgatttaagaagagcaagagcaggtgctgtcaacattgttcctaactcaacaggtgctgctaaagcaatcggtcttgttattcctgaattaaagggcaaacttatcggttctgctcagcgtgtaccggttcctacaggttctacaacaatccttacagctgtagttaaaggcagtgatgtaacagttgacggtatcaacgctgctatgaaggctgctgaaagtgattcctttggttacaacgaagatcagatcgtatcatctgatattgtaggtatcacatatggttctttatttgattctacacagacaatggtttctccgattggcgatgatttatatcaggtgcaggttgtttcatggtatgataatgaaaactcctacacaagccagatggttagaacaatcaaatattttgctgaattagcttaattttgaaatcagaataaataaataagatccttggcgggtccggtctcattggaccggacccgtttttgcgcttaaagggcgcttaaatatagtcagacaaaaggagataataatatgctgaataaagtttctgttgatgatattaatgttaaaggccagagagttttagtaagatgcgattttaatgttcctttacaggatggaaagattacagatgagaacagactggtagcatccctgccgacaatcaagaaactcatcgctgacggcggcaaagttatcctttgctcacatcttggtaagccaaagggcgaagcaaagcctgaactttctctggcacctgttgctgttcgtttaagcgaacttcttggtcaggacgtaaaatttgctgcagatcctgaggtcgttggtccaaatgcaaaagctgctgtagctgccatgaaagatggcgatgttgttcttcttgagaacacacgttacagaattgaagagacaaagaatggggaagccttcagcaaagaactggcaagcctttgcgatgtttatgtggatgatgctttcggtacagctcacagagcacattgctccaacgtcggtgtcactcagtatgtgaagacagcagctgttggctatttgatgcagaaggaaatcgatttccttggcaatgcagtcaataaccctgcaagaccttttgttgctattcttggcggttccaaggtatccagcaagatttctgttatcaacaacctgcttgacaaagtggatactctgatcatcggcggcggtatggcttatacatttatgaaggctcagggcggtaagattggtacatctctttgtgaagatgattatcttgattatgccaacgatatgatcaagaaggctgctgataagggcgtgaagatgcttattcctgtagatacagtaactgctgatgcattttctaatgatgccaatgtgaaagtagtcgatgccggccagatcgatgacggctggatgggccttgatatcggaccgaagacaagagaactgtttgccaacgctgtcaaagatgcgaagacagttgtatggaacggaccgatgggcgtattcgagatgcctaactttgcagctggtactgttgcagttgctcaggcactggctgatacagatgcagtgacgatcatcggtggcggtgattcagcagctgctgttaaccagcttggttttggtgacaagatgacacatatctccacaggcggtggcgcatctcttgaattccttgaaggcaaagaacttccgggcgttgcagcagcaacagacaaataatttaagtggataatgagtcaattatttattatatagaagggatcgtaatatcatgcgtaagaagattattgcaggcaactggaaaatgaacaaaacaccaagtgaggcagtggctcttgtagaaacactgaaaccacttgtagcaaatgatgacgtggatgttgttttctgcgtacctgctatcgatatcattccatgtatggaagcagctaaaggcagcaacatcaatattggtgctgagaatatgtattttgaagaatccggcgcttatacaggcgagatttctcctgctatgctgacagatgccggtgtgaaatatgttgtacttggtcattctgagagaagagaatactttgctgaaacagatgaaactgtcaaccgtaaggttctcaaggcttttgaacacggtattacaccgattgtctgctgcggcgagtctctgacacagcgcaaacagggaatttacatcgaatggatccgtatgcagatcaagatcgcatttcagaatgtaacagcagatcaggcaaagacagcagttattgcttatgagccaatctgggcaatcggaaccggtgaaactgcaacagcagatcaggctgaggaagtttgcggtgcaattcgtcagtgtatccgtgagatctatgatgaagcaacagcagaagctatccgtatccagtacggcggttctgtgaatgcaggcaatgcagctgaacttttcgcaaaaccggatattgacggcggccttgtaggcggtgcatctctgaaaccggacttcggcaagattgttaactacaacaaataatttttatcaataacaatatcaattggggcgcgtcttgaataattcggcgcccttttttgaagaaagtgagagaaaatgagtaaaaaacctacagttttaatgattcttgatggttttggtttaaatgacaaaaaagatgccaatgctgtttatgaagcaaagacacctgtcattgataatttaatggcaacctatccatttgtcaaaggaaatgccagcgggttgtccgttggtcttccggaaggtcagatgggcaactctgaggtcggacatatgaacatgggcgccggacgtattgtttatcaggatcttacaagaattaccaaagagatccaggatggtacattctttgaaaatccggctttattaaaggccattgagaatgttaaagccaacaattctgcactgcacttatatggtctgttgtccgacggtggtgtccacagccataatacacatctgtatgggttgctggagctggcaaaacgtcatggacttgagcaggtctatgttcactgcttcctggatggccgtgatacaccgccggcatcaggtgcagattatatcaaagaattgtacgagaagatgcaggaactgggtgttggacagattgcttctgttatgggccgttactatgccatggaccgtgacaacagatgggaccgtgtagaaaaagcttatcgtgccatcgcttttggtgaaggcatacaggcagaatgcccatatgatgcggttaaggcatcctatgagaaggaagtttatgatgaatttgttgtaccgacggtcattatgagagacggcaagccaacggctacagtcaatgacggtgattccattatcttcttcaacttcagaccggaccgcgcccgtgagatcacaagagctttctgcgcagatgaatttgatggttttgacagaggcgaacgcaagaaagtaacctatatctgttttacagaatatgatgtaacaatcccgaataaagaagtggcattcaacaaagtagaaatcaaaaatacatttggtgaattcctggcttctaaaggactgaagcaggcaagaattgctgagacagagaaatatgcacatgtgacattcttctttaacggcggtgtcgaagcaccaaatccgggagaggacagaatccttgtgaattctccaaaggtagcaacttatgatctgaagcctgagatgagtgcttatgaagtgtgcgataaactcgtagaagccatcaaatcagataaatacgacgtgatcatcatcaatttcgccaatccggatatggtgggtcatacaggtgttgaatctgcagcgattaaagcagttgaagcagtggatacatgtgtcggccgtgctgttgaggcattgaaagaagtggatggccagatgattctctgtgcagaccatggcaactgtgaacagttggttgattatacaacaggggtgcctttcactgctcatacaaccaatccggtgccatttattttgattaattatgatccggcctacacgctgaaagagggaggctgcctggcagacctggcgccaacactcatcgatatgatggggctggagaaaccggtagagatgactggtcattcacttcttgtgaaacgataaaatatactttacatgctgtaggaacctgtgctataatgatttagattgaatgcaggaggtgtacgcatgagcggtatcagaattgcagccacagtggtatatatcattgtatgtttagtacttgtatttttagtatttaaaggaaaaggtcagggtgcggatctgtctggcggaattacaggcagaagcaacgacacatatttcacgacccatggtaagaagcacacagaagatgctttacttgagagatcaacagctattttggcagcgatctttattgtattatctcttgtgatgaacatgagctggggatactaagaatgtcagactgctgaaggcagtatcattcagccggtaatacttccggcctgaacatgtacagcaagatgaatagaaacactccttcgggagtgtttttgttctttctgcagatagaatgtatagaatgcacagagaatgttagcggcggatacagatccggccgaagaatagaaaagcgagtatagaaacaggaggtgacaaacatggacaaggttatttttgatgtaagaagaaaaatggtcctggattttattgaagagaagaactacaaaccgatgaagttcaaagagctttgcatggtattttcagtgccgaagcgtgagaaggaggaatttaaggaatttctggatcagctcattgctggcggagaactgacattgactgagaatgggcgatataagaaggcagaaccggataccttcacaggcaagttctgcggcagtacaaggggctttggttttgtgacagttgagggcatggagcaggacgtatttatcccggcggatgagacaaagggtgcttttcacggggatacggttctgatccagctggtggcaccggctgtcccggcgggcggtacaagggcagccaagagggctgaaggaaaggtacttcagattgttgaacgcggttttacggaagtaaccggtatttttcagaagaataagaattatggttttgtgatcccggataaccagaagattggcagtgatatttttatcccgtgcgggaagaccatgcgggcggtgaacggccatcgtgttgtggtgaaactgacggattatggcaatgatcgtaagaatccggaaggaactgtgacagagattctcggccatgcggatgatccgaagacagatattttggcggttgtgaaagccttcgatttgccgacggaatttccggaggatgtgaaaacacagcttttatctgttccggaatctgtcagcccggaagagaccgaagggcgcagagatttgagagatcggatgaccgtgaccattgatggagaagatgccaaggatctggatgatgcgattactcttgaaatgaaggatggccactattttctgggggtgcatattgcagatgtgacgcattatgtcaaggagggatctccccttgacaaagaggcactgaagcgaggcaccagcgtctatctggtcaataaggtgattccgatgttgccccatgccctttccaatggtatctgttccctgaatgaaggggtggacagactggcactcagctgtctgatggagctggatgaacggggcggtattatcggccatgaaattacggagagtgtgatcagagtcaatcaccgtatgtcttacaaccaggttagtcgtatattggatggggacaaagaattaatggtcgtatatgcggatgcggtgaagatgtttaaagaaatgaagacattgtcggatcttcttcgcaagaaacgcaaggagcgcggaggtattgattttgattttcctgaatccaagattgaactgaacgatcgggatttcccggtggatattcatccatatgacagaaatccggcaacgaagatcatcgaggatttcatgctgatggccaatgagaccattgcagaggatttcttctggcaggaactgccatttctttatagaagtcatgaatccccggatacagaccgtattaaacgtctgatgatcctgattaagaactatggatattatatgaatatccgtcaggacagcattcatccgatggaatttcagaaattgttaggtaagattgaaggaacgccggaagaaaccatgatttcaagactggtactgcgatccatgaagcaggcccgctatacaacggaaaatctcggccattttggacttgcagtttcctactattgtcattttacgtcaccaatccgaagatatccggatcttcagatccatcgtattatcaaggagaatcttcacggtcagctagatgacgggcgtcaggcacattatcatcatattctgccggatgtcgctgttcagacaagcagtacagagcgcagggcggacgaggctgaacgtgaagttgagaagatgaagaaggcagagtatatgtccaaacggattggtcagaggtacgaaggtgtcgtctcaggcattaccaactggggcatgtatgtggaattgccgaatacctgtgagggtctgatcagactgcaggatatggacgatgattattatatttttgatgagaatacgtatacattaacgggagaagataccggaagaaccttcaagctgggtgagcatgtccgtatcattgtcaaagatgtagattttctggcgaaagccgtgaattttatgctggaggacagcatttttgcagagggggaaatgtaatggccggaaaaggaaccaaactgatcgccaataacaagaaagcgtatcatgattattttatcgaggataagtatgaggcgggtatcgttctgcacggtacagaggtaaagtctctccgcatgggcaagtgcagcattaaggaatcttttattcatgcagatcatggagagatttatattgagcatatgcatatagcgccttatgagaaaggcaacattttcaacaaagacccgcttcgtacaagaaagcttctgctgcataaacgcgagattacgaagcttctgggacaggtttcccagaaaggttatacaatcatgccgctgcaggtgtatttcaaggacagccttgtgaaagtccagattggccttgctcgaggaaagaagctatatgataaacgtgaagatattgccaagaaggatcagcggcgagaagcagagcgtgagatgaagatccgccttcgctgatcgacgaatcgggatgcagcctttataagacaaaaattaataaaatttttacagtttggtcaagactttgatgcaaagtttttgctataatattaagaaataaaggggctgcgatatatgagaaaaagaagaacacgttattcagaacgaaatacaaggtaccatagtagaaaaggacagacatttcagcagattattttatcgatagtggctttgtttcttgttgttatatttctggttgtgctgtgcacggatccaatggggaataacggcagtgtgccgccggagaatgtcatggccgccaaagatgcggatgagacagcggacagcaatgtttcacagagcgatgagagtgtatcagatacagcatccgcagatggattagatcagacatctgacggtcaaacagacagtaccgcttcaagttcagactggcggctgctcctggtgaacagtacccattcgattgctgatgattacagtattgatctgacggaattacgcaatggtcagtctgttgactcacgtattctcacagatcttcaggagatgtttgatgcggccagatcggaggatatctatccgatcgtcagcgatgcatacagaacacgggaagagcagcaggcgctgatggacgatacgatccagaattatgaggatgaaggctattctgcagaagaagcaacaagtaaggctgaacaggtgattgcaaagcccggaaccagtgaacatgaaaccggtctggcaattgatattgccggtgatgaagactatggacaggatacagacagtgtcctggcatggatgaatgacaatgcgtataagtatggctttgtcctgcgttatccatccggaaaggaatcagtgacgggggctgcggctgaggatgatcattatcgctatgtcggcaaggaagcggctaaggtgatgtatgataagggcatttgtctggaggaatatctgagtcagaacaattaaaaatgattggatataaaaattaacccgtagcgtaaatctaaaagcttggccgcgggttaatttttgagcatttattccacagagacggaagatagctataatatatacttttcttttttgcccgattagttcctctatcttttgcattaatgtgtgaaaatcaatgttttctatgccgacttgaagaaaatcacctatttcacaaatacattgcttaatattttcttcagaagcggatggattttgttctaaaaaaatattaacatgttcctggatgatatccataattgctcgaacatcttctttagaataaacaagcgacaactgatatttcatgtttttcaaataatttttgatttttttggtgtattcatttttctccattaatttgagattactttaagattttcaaaagctgtgtcgataatccagtttcttatttctagcgaaaggatacttaaacaaataaaaataagtatgcaaaacgcaataatgataattatttctttattaataacttttgtatctattttgctgataacatggtcaacaggcgcgttttctatccaatcgcataatacgtcatttatttgaatatgttctttaaattgttccagtgaagctctgatttggcaactgcccaatgggcagtgccaagaatcaagaatgttgattatgggattttaaattaagatatacatgaaaaaagagaacagctttcgccattctcttttctacaaactggaagttatcgcctaatcttttaaattagttaaatcctctaagtacatttctgtataaccgcactctgggcagactgcaacttttacatcatctataattgttgccttttgcttttcatctacacgaacaacaatcccatagccaccaccatttactttaagccttaaatctgataccataacttttccgcattttacacattttctcattgtttaccacctccaaatgtataaattaaataccgatttgttaaattcatatccacattatagcataaaaataacgacactgtagattactttcgcaacatacaatgtcgttacttttattttcttcgatacaccaaacaaaacatattcctgtatacgataatagcatatacagagattaacttgttcagttttagtggacctgcggggagtcgaaccccggtccgaagatatctccatccaagcatctcccatcacagtcattatacattcattccctctgccatatgcctaatgacaggcctacagcatcagtagcttcataaattttccaaagctgcaaagcttaagctctggaggtcctcaccttcttcgatgccggtaaccggaatggtgagcagtcccgggccgacaagcgcctaattaggcagctaaagctaacttatcgtctgcttttatatttaggttccggcttttaacgcagctccggagtctgcggatggcttctcaaacttcaacatccccgtcgaaaccagtacaagcccttatgatgatgactcatttacaattacaataatctatcatctgaacatgtgcggtatgcaaacgaatggataaagcatagtttattatagcagattttattttaaagtcaacgggttaatcaaaatgtgtggtcgtatttttttggaatgtcccggattgaaatcattcagctggatgtgcgtgcttatcttgaaattcaacctcaattccagtataataaaatcaccagagaaagggtgaggttatcctgtgaatacagaaatcacgaatgcgctgaaagcgaccagtgacacagctcagtatgataacagcgccaaacgcttattggcaataagtatattttgacgcagatactggtctatactgtagatgaattcaaggggatgcagccgatggatgtagttcctttgatagagggagaaccaaagataggaattgttccggtagaaccgggactcacaaatgaacgtcagggagataagattatcggtttaaataccgagaatacagaagaaaaagaaggccttatacgatttgacattgtattttacgctcgaatgagagatggacttacacagatcattatcaatgtggaagcacagaaggatgatcctgatgagtatgatattctgaacagagctattttctatgtcagtcgaatggtttcatctcaaaaggaacgggattttgttcatcaacactataacgatatcaagaaagtttactcaatctgggtgtgcatgaataacaaggcgaatacgctgaatcatattcatttgaaagatgataaaatcatcggtcatcgcacatgggccggaaaactggatttgataaatatcattatgattggcttggcggatgaagttccaaatcatgacgaaagacttcagttgcatcggttattgagtgtactgttgtcaatggagatgaaggcaaaggataaaataaaaatcatggaagcagaatatggtattccgattgaggatggtatcagagaggaagtgaatatcatgtgtaatcttggtgaaggacttgcaatcaattatatgaagcgaggttgggaacagggacttagtaaaggtatgaaggaggggatagaacgtggcctgaagttaaaatataccccatagaatggacacgataagaagaagggttccttaaaaatggacacaagaagaagggataaaatcctgaggattttatcccttcttcttgtgtccatttttaaggaacccttcttcttatcgtgtccattctatggggtatattttagtataggtctttttcagcccttttacttccaaaatactcatatttaaaatcctcctgtctgattgaatgacttgttcatttcttttgacaggattattgtatcaaactcttttcatccgctccatcgaatggccttacagacttcttacacttttgtaagaagtgctgttcgttttctactcaaacatacgctccgctgtattcagattcaatttgatcacagtccctttatccggttccgattcagccgaaataccatggcccaggttacggcagattctggcacaaagataaagccccagtccgctggcttttttatccgttcggccattatacccggtataccccttctcaaatattctcggcagatcctccggtgcaatccccatacccgtatcacggatacacagtatcttcggtgattccagataaatggacacacagccctgctgtgtatacttcagtgcatttgaaagtatctgttcaataacaaaaagcagccatttctcatccgtcataatctgtgcattcagcggctgataatccaaatgaatctttttgccgataaactgccccgcaaatttgcgcaatgcctgccgcaggatatcgtccagatcataaaccgcaataacataatccctggtatctgtgtccaatctgagataacacaataccatatccacgtactgctccaccctggcaagctccacagaaagctttcttgaaaagaatgaatctgtattctgcaaagtcagccgcatagctgcaatcggtgttttaatctgatgtgcccagacggtataatagtccatcatatcctggtattgaaaagacatctcatccttcatcctgcgctgtccttcctgaagttgaacaatgatctgctgataatccgtctccagcacacttactgattccgggaaatccgtcatcacatcaaaaggcatcgctgacaattgctgcagcctttcatgccttactgcaaactttctgtaatcccatacaagaaaaagcatccctgtaacaaagcagagcaacaccggataaaaaatcgcagtaaggggcagatgatacaaagcaaaagtcacaaaaaatataatcgcaaaaagtccctctttcaggaacagacttttcttttgtcccagccacttcacaaaattgactttttcttccatcattcctgccctttctcatccgaaaaaatcacataacccacaccgaattttgttgtaataaaatctttcagcccggctccctccagcttcttcctgagacggttcacattcactgtcagcgtgttgtcatcaataaaactgtccgtttcccaaagccgttccatcaaacgttcccggctgacaatcttaccggcgttctccataaggatttttaaaataccatattcattgcgggataaagcaatttgttcgcccctgtaagtcagtgagtgatcatctacattaagaaccgcctcccggcattgcagaacatgctctgtctttgcaaaatcataggttcttcgaagcatcgcctgcattttggcaatcagcaccgtctggtcaaagggtttagcaataaaatcatcaccgcccatattcatggccataactatattcatgttgtccgaagcagaggatataaaaattaccggtacgcgtgagacctttcggatctcaccgcaccagtaataaccgttgaaaaaaggcagaccgatatccatcaatacaagatgcggatcaaattccgcaaattctgccatgacatttctgaaatttgtcacactgtgtgtttcaaaattccacattttcgcctgctcgctgaccgcttcagcaatgccggcatcatcttccacgatcaatattctgtacattcattgcctcctaatgcctgcgctgcaaggtatttaaaacaccatttaagcgaaccagataaaggacttcgcacacaagtgccataaccgcacatacataataagcaaacaagatttccactgaagcagatctaaagcaaagtaccaggatcaaaacacagatcagcacctgaaacaggctcatatagcaccaccatctcttgaatttctccagcttcaaatcaccggatacatcagtctcaatctcatataaagactgcaggaacagataaagcacataaaaaagtaccacataataaatcagagataaagccgtctcaagccaggcaatattcgcaccgatccctgtcaacgccatcacataaagaattgccgaataaacggtcaatacaagcagcgttgtccttgctgtcgccagtcgttggcatgtcttcggataagcagccatgatatccttaaaaccaagataaagtaaaaaacaaccaatgaagtccggcaggattccgaatctcatactaccatttgtaactgtgaaatcaagcagcgccagaattgcgccaataaaaatctttatcatacctctttcttctccttttaatccttttgcatgtcgacccaccgtgtctgacgcataatcagtcattacagcagacgcacctgttctgttcataaagcaagggctgagccttaaaagctcagccgtgcataaatatcctttggaatataggctttcacataaatgccgtcttcctgataacgttcatccagaagctgaccatactttcggatcaccgcaatctcacccgcatgggcataatcaaagaccctctcgatcagcagcttattcgctctcagaatcgtctgcactgtcgaaagcagcgcatccagccctgttccctgcttcaccgaagctgtcactgtatagtcagccctgaaatccttcagactgacaagactttcctgatcccggatcagatccgttttgttaaacactgtgataatcttcttatccttaatatccaatgccgccagggtctcatacacaacgtgcatatgcatctctgcctgaggattggaggcatctaccatatggatcagaatatcggcgtacttcgcctcctccagtgtacttctgaatgcatccaccagatgatgcggcagcttatgaataaaaccgacggtatctgtcagcaacagttcctgcccgtcatccagtgtcagattccttgttgtcggatcaagggtagcaaaaagtttgtcctcctcaagaacaccggcacctgtcagtctgttcagaagtgtggacttaccggcattggtataaccaacaatggcagccaccgggatctgattcctctgacgctgctgtctggctacttcacggtgccgcttcacatcttccaactcccgtttgagctgtgaaatacgttctctgatcaatcgtcggtccacttccagtttcttctcaccggggcctcttgtaccgataccgccgccaagacgggaaagtgaatttctcatgcccaccagacgggtggctctgtaacgcaactgtgccagctctacctgaatcttaccctcacgggttgtggcccgttgggcaaaaatatccaggatcagcaatgtacgatccatcaccttgatatccagcacatcctccatattggccatctgcgccggtgataactcatcatcacagatgatacctgttgcatgggtctctgagatgagaaatgctaattcttccagcttacccttgccgagataagttcccggatggatcatctctctattctggatcaatctccctacagtcattgccccggctgtcttcgccagttcttccagctcatccagtgactcatccgtcaccgacgtttctcccagagcaacacccacaagaatgacttcttctgttacccgtttattctcataaaaatctgccataaactctcctgtctgttattcaagacgcatactcaggcggtctactgtgtgacacggctctcgaggaactgatattccttctggccctttgtatcctccggatacttgctgacataagtcttggctgtattataagcatcctcccattgttcaagatgttcgtatgaaacgatcaagttgaaggataacactgcatcggactctctgtcattataagtcagaccgctctcacaggcctgtgctgccttctcatattctcccttggccaacaggactgctgcgtactgattgtaggtttttgctgcaagggatgcatcaacactgctgatatcaacttcatcaaaatacttcccataataagtaagcgctgtatcgtaatcctgctgcgtataagatagttctcccagtcccagcaacgctgccttgtagcctttgtcgtaagatttattcaacatatcagccgcattggtataatcctgaagatctacataaatcattcctcgattgtaataatcttcaccgctgctgccggataactgcagtgcatcattcagtacctgtttcgcctcatcatccttgccctgagcttcaagggcactgtacaatgttctgtaaactgcatagctcttccggctctgcttgatggctccataaagatccttctctgcggatgcataatcctgcagctgcatatacgccatacctctcaacattcttgtacctgcatcatccttcagatcaataatctggccataggactggactgctgcctgataatcaccggacttctgttcggcttctgccttataatataaggtatctatccgaatatcattgctctggctgctgatattcaatgcatccccaaaccatttgatggcggtctgatagtctccctgataaagacaggcaatcccccggccgcgattcagcagcgccttctggtcatcattttccgcacaaccctctgcctggttgaaataaccaagagcctcatcataggatttctgttccacatacgccatgccgagatgtatgtaatagtccgcattgctgccatcataggaaattgcttccttaaattcgttcactgcggtatcatagtcaccactttcataggcattcatgcccttgttgtcatgcctggaaccactgttgtaattcttaacagaaaaaacagtgaccacaagtgccgcgatcaccaggcacgctgcaaccagtctgagtgcctgtttctgtttgcgcctgcgtatgatcttcctgcgccgttcctgatgctgtttctttctgcgtgcttccgcccgcttcctggccatttcttcgtcttcttcggttcttctggccggtcgttttttcggaacctcatattccggatgcactttgttcgttatattcttaatacggcttctgtcagattccgtatccttcgatatcttccggttctttcgaactctcttgtcgtcattctccaagctatacgcctccttctaatctgactcaatattccgtctaaagcattcgcttacgccacaatatccacaaaataaacagacataacagaaatgtcagtccacagataataccaaatcccatcttcaatgagccaaaaggcattccgcctgtattcacattcataccatacaaaccggagataatcgtcggaaccgccataaccagtgtgatggacgtcagatacttcatggtattattcaatcggttattgataacgttggacatcagttcactggtaccatcgataatctctcgataaatcgtcgccatctcaatagcctgtctgttctcgacctgtacatcctcaagtaaatcttcatcttccgggaactgcggaatatgcttatatctgcgaagcctgtcaataaccatgcctgctgcacggagagaagtctcaaaatagaccaatgtagactccagatcatgcagttccacaagatccgcctcgtcttccttctcttcaccgattcgggcctcaatagccagtcgtctgttgtcaaccgaacgaaggacattctgatacgttgtcatagaattcagaagaatctgataaacaaaacgggtacgcttctttgttgaaaagtatcggacatggctcttaataaatgtattcaaaatcggtgtgtcttcactgcaaattgtaatgatcgcgccgtctgcaaggatcaaaccgagaggaatggtcgtatagaccttcttctcatgctgtatctcacttgccggaatatctaccagaaccagcgtataatcatcttccagcacgatacgggatttctcttcttcatccagtgcggctcgcatatcttctatgtctatattgtacttcttcgcgacaggttccatctcccacatggtcgctgctgtcaccttgacccaacagccttcctcaaagtcctgcaaagcattcagcttgccgccttctgtttcatatatattaaccacgtatctcacctgcctcattgattcttattcatttgcaccatacccatcttaacatacccaaccctacttctcaagcttttttattttcagtctctaaatgccgctgaaaaatgtaccaaaatttttagatttatctatccctgtatgattttatgtgatatactagacatagtgtctataatattgttaacaaagaacgactcaattttttaaggaaaggaatcattggttgaaaatgaagaaaaagtttatgaaaacatgcttggctgccgcactgagtgccgcactcgcaatcgccactgttgctccggcctttgcagctgattttacgccaaagtatacttattccggtgacggcatgactttcgaaaaggtttcccatgccaactcaccaacagaaactgccgatggtattgttgattatacaggcaacggcagtatcgccccttatgttcagggcgtcagtgcagacggcaacggtgaccgcggtcaatcctacagctacgcatcggcttcctatggcgactgggtttacatcaacaccatgtacggcggccttggtgccaatgccattttgaacagaggcttaggtgaactgacacctgatgctgccgctgctcttattaacatcatgtacaacggcacgatgtacaccggcgaaccggatggcaagagcgccggcggtatgttggtgaaattcaatgtcaagaccggcgagacaagaattctgatgtccaaagataccaacggtatcatgcccacattcagaagtgccatcaagctgaataacaaactctattttgtgggtatgatcattgatgcgaataacaagcagctgacctcacaggaaattgcgtatgcaacagctgtgcaaaacggtttcccatgtatttacgaagtagatcctgccaacaatgataagctgacctgcatctacaattgtgtagatactaacggtttccgtcagcttgtcaaggacaatgtctttacctccactcgtgccatcggtacatatgaaggtgccatgattgccggtgcccttgatactaacggtgttttcctggttgcttccaaggatccatctcagggtcagagctccttcagtgtgattgcagatatgaacgacctgttcaactaccctgcttatcaccgcagtgatgtcaacggtggcggcggcatctatcaggtactggaatacaacggcgatttatatgtcgttatctgcacgggtacaccgaacaacaaaaacgaagctaccggtacacttcagacatttgctattgtcaaaggtacctgcagcggtgatgtcacagataagaacgcctggacatggtctgttctggccggtgatgaagcagatggtgctcgatatccatttggtcttgataccgaacgtgtcagcgccggtgcctgcacactccaggtttacaatgattacctgtatatcggcgattacaacgatgtatccagtgctctccagggattcgttctaaaaaacgaatttaccacacaggcaacaaaccttgaacagtctgtcaacctttatcgtatggacaagaatgaaaatattgagaaggttgttggtgatccgacagaagccttcccaacaagcctgtccggtcttggttcaggatacacatccaattccctgctgaagaaaatgggtacccatatgaatcagtatacatggcagacaaccgtttataacggcaagatgtatgtcggtaccatggataccacaacccttcttgagccactggccaaatacaccaacggcgatatccttgaaatgaccagggacgaatggatcagccagattaattacatcaaggtcatgctgaaactcttatttaagacacctgttacttcttcaatgtcggctgaatctgttgttcctgtagaaacttccgctgaaacagaatcagcagaaactgctgccgaaacaattgcagccgaagaatccgagacagaagctgctgtcgagaccactattgatgatatcctcagcagtgacaccgctgccgtacagacacagactgaagaaggtattgctgtccaggcaattgaaacagatactgccattgaggataacgctgctgattctgatgcagatatcgaagttgctgttgaaaaccttgatgacgcacagcctgttgctgtcagtcctactgaagaaccactgacagaatcctctgccagagtccttgtggaagcagcaattcaggaagtgcagaatgatgccgcacagtccttagctgacaatgatcagagtaccgatgcgattactttaacagatgaacagataaatagcctggtcagcggcctgcttgacggcaatatcgctccacagagtatggatgaacagttatacaatcagcttgtcacagtcaatgacaaactgatgagcattgcttctttagttgatagtaatgatatcgaggcattcgtcactgtttatacagccatgtccgatatcatcgatcagatcaacgatcgcattcctgaaaatgtcaaggcattgtatgctacagtgatcaaatatgcgacaaaggaaaatcttaagggactcgcaagttcactgaaatacatgcgtacatccgaagccggtttcgatttgtttgagatcactgataacggaagcgccggtgtttccatcaaaaaagtaaccaccaatggtttcggtgaccgctataaccatggtcttcgtatctttgagaagacagatgattactgggttatcggcacagccaatccattcaatggtacacaactgtggcgtacaaccaatcttgagaagaatacagacattccggacagcacagaaactgaaacacctgaaacagatgtcaaaccaggattgatgccaaaaccaagtacaacaaaaccgacaacaactgtgaaaaaaccaaccacttccgctaaaaaggcaactgcaaagaaagcagctgttaagacaggtgatgaaagcaactcaacacagtttatcgtattaatgggtatttctgcagcaacaatctttattctcggctatcgcctgcgtaaaaaggaaaattaatcaagcggcagtcgccaaggtctcgtgcaagcacggactttggcttgttgttcgcgtaaatcaaaaggaggttggaactcaatgcgaattccagccttcttttcatctatactgctttaatttttgtaacttttaatcaggaaaactattttccagacagagtgctccgaatcccacccgaatatccggataaatactaacgcctcgcagcggtcttgccccagccagcagataagcctttaatttgtctccatacaaatacggatcattttttctcacaatgccatattccatcagcagtgctgccgcccctgtcacaaaaggcacagcaaaggatgtccctgaaaccacagtataacctccgcccgccaatgttgttgtaatatccacccccggcgctgacagctctggttttacactggcaaaagcgcccatataccctctcccggaaaaatccgcgtaatcatccagccatatattataagcacctaccgtaatggccttcttggctgttcccggtacagtgattgtcagatccggatccggacgcagaaatcccgtattttgattcaaaacccccgccgttggaagccacatctgaatatcccctctgataatcctccccggaagaagccggatcgtccagataccgcccgccaaatactgtctctgtggaataaagtcgatataaatttcctgattgatcgaatagggtgcaggctcaccgtaatacaataaaatctctgtattttccagacgaaaacgctgcggaccgagaatctttttgatttgtccgctgctttctcccgaaggactgataatttcaatatctgcctcatcgccataatacttccatatctgaacattcagggaccgttcatattcactgacactgatatctgcatccagagtcttttctgatatcatgaccgccctaaaatgtcctgctgaaaccgcattatttccggcagcaatgatgatattattcttccatatctgcgacactgtatcaatataggattccagaagcgaactgccatcatgcgccccatagctgttgccgaaactgacattcacagccaccggctttcccgcatgaattgcctcccgaatgacaaaatcaagccccaacattaattccgttgtcctcggaaatccccgttcatttgtcattcccattttcaccacaagcagttcgcttccaggtgccgctcctctgttgacaccgtcggaactgctgccgtttcctgccataatccccgccaccgcagttccatggccactcctgtcttcacttggcactatccgctttctttcttccgctgtttctgccgccaacgcattattgatatcctcttttgtatacaatgcacccctgtcatatccttccggcggcattccctgagctgcctgatcccacagtgcatgaatccgcgttgttccatcgggatttctgaaatctctgtgggtataatcaatccctgaatcaatgaccgccgtcagaacacctttccctgtcagctgcagcggtggtgcctgcactgggttaatgcaggaggcaatccttccctgaacaacagtaaagaccagctgtttggacttttcaatgtaagtaatcacttcctcatctgaaaaatcatccagctggtcttctgcaatcgtcacaatggcatactgccccaataaaggtacaatccgaatgccggggtatcgattggcaagtgacagaatatccccggtatacttcacaataatctcccaggtatctgtctgcgggtcaaatcctaccccaagattctccgacttctccttctctgaatttgtagaacctgctgccagattcagcaaattctcaatcttctggtcagccataataactcccattcatatcatttctctaatatattcctttgactaaattacaagaaccgataacacacatgcttctgccacagttgctgtagatgcctccaattcaatgacatgatccagaaatcctttttcttgtaaatatttttccgcttttactaatgacattatcttatgttcctttatccttttgtccgtataattaatcggcaatctttgcctgctgcctttcatgctctcttgttacctgcctcagacacatcaggcataccggcgtaatatataatgttgctgaaacccatgctgtctgatctgcaaaacaaatggctgtaaatccgtatgttcccacaaaagcaaagctgacaaaggttcgtgcaatcatttccgttacgcccgagaaaatcgctcttcctgagaagcccattccctgggcactcattctgaagacactgagcggtccgagactccagtagaagaaaccgagacaacgcaaatatttggctgaggcatccaacaccgccgtctggtccgcactgataaagagcatagacaacgacctgcccgcaaaaatcagcaccagaccaatcaataaaccataaataaacccaacgcctacgccctgccataaaccttttcggatacgcttaatcttacctgcacccagattctgactgcaaaagacagaaacgccgttggccaaggcatcaaatggacacatggcaaactgtttaatacgcatgccggctgtaaatcccgatacatagatacttccaagtccattattggccgactgcatcaccatactgccgatggccgtgatggaaaactgcagtcccatcggcaggcccatcaccagcatttctttcacataaaccggctgtaaatgacaatcttttctcttcggatgaagtatctgcactttctttataataaaaatcagacagcaaagtccgctgatagcctgggctgtaatggttgcaaatgccgcacctgcacatccccatttaaatacgatgatacagatcagatccaataccacattcaaacaagctgaaaaggccagaaacaaaaatggcgttctgctgtccccaaccgcacgcagaatgcttgacaggaagttgtacaaaagtgtaaatggcagtccaaggaaaataatcaatatgtaaatacgagcgttgccgtaaatatcctccgttacagacaacatcttgagaatccatggacaaagaagtacacagcctgttgtcaggatgactgcaatcaccgctgtcagcaaagcaccatgaaaaatgtcttttctcatacgcccaaattgattggcaccgaaatctctggccaccggcacaccaaagccgctgcaaagtccggtacagaaacccaacaccagaaactgaacactgctggtagcaccaacacctgccaaagcctgcgtgcccagaaaacggccgacaatggccgcatcaatcatattgtatgtctgctgtaataaattgcccaccaaaaggggcagagcaaaccggagaatcaatccaagggcattgccctctgtcatatcctttgtcattctgcctgctctccttcatttatcttttcttctatttcagcattttcggacagtttcctgatacgagtttccaaccattctctgctgtcatctgccaatgaataatgactgccgctaaagaaaacccctgttttatccgcatcctcatcagacgctcccataatccacaattcttccggctcacatttcaaagcatcataacgatgtgtcacatctttgattcgtttgctgtggaaaaagagttttctcgccgctgctttcatttccccaaaagtcagtaatgcaattttatcctcttccacatgcaatttctcatgattagccctgataaaacggagagcacgggccatatcatctgcttcgctctcttttcggagattcagaataaaagcctggcatcccagttcaacaatggttttcgccattttcatgccttcatccatcatccgctgacgcccattctcccagtccgggcaaataagaatggccggccgattctcttcatccgatataaatggaatcaacacaacatactctgctgcttcagcttcattctccggtagtccccgccaaattggaatcgtgattttgtctccggcttcacgtctctccagaataaaattggcggcatccaccaactcctgtcccgggaacttcgtcatcttcatcatatttttcaatttcattttggagaatggccattttatctgactgcataatgcaaggtcaaaaaaaatgggcaatttcttattgacccgctcattctcagaaatttctgttactgtgctatctaatgtaaatctctcgttcataactcttcccgctcttattgtgtaaacttcatgttaaatgtatacctgcacaacctttatctcaaccgcaaattagcatcctgccaaaacaaaaagataatgcgctgttttttattgtagcattatcttttttgcaaatcaatatttctgatgtataacattattcttttctggatatactgttattgttctaatcgataacgattagaatcccccctccagatacaaaagatattttttgactcacctatgagtacttatcctcccctttttttcctccgggtgctcacttacagcccggaggtttcccttttcacatgattgctctttttattcgggttcaaaatctgtccgatcgcagttctttcttgacggataaaaggcggctgttatacaatacatattgaagtcaatcactcacttaaaatagttccagaaaggatatgcatatgaaaataaaaagaatctttgccatcattgccgttgtactgcttgtggccctctatggctcaaccattgtctttgccctgtcagacagtccgaatgcggtttacatgttcaaagcatccatcttctgcaccgtgatcataccgattattctctatagttacatactagtttacagggttttgggaaaaaaggaatctgatcatactgatgatgcaaaggatatccccaaaaaataacatttgttaataaattttatatttcttttatcgcaaagacataatttgaacacaatttatgcgtataataacatcatagcaatcaagcagatggttgctatgcagtttgattttttcataacattcgccggatggttccccaatagccatccggcctccctcttttataagcctttttcaggcttatttttttgccgtttatggatggaagtgcataccagcgcaagttctatttcccgggtttcttcttcggtatatgatttctccattttctatcttcatcaaaacctttgactcactctgttccaattcactgtaaacatcgactttctcatcatatactgtcagatttgcctgatctcccactttcatcgtcaaattaccggacataatcttatattccccggatggctgataagccgcccccatctcatgcacattatccccggtcgcctgactataaaggcaggccagcaccgatttattcttgtaaccgcacataatggtatccagtccgatatatctggaaatctcatcgcagtcaccaattgcaagatacttcccatccttaactgccaatgcgccatttcttgccctgccgtcactttcgaaaatacgtccgctgatcacgatatccgcaaatacttcttcattctctgtataagattcactcatctgatttccatcctttctgtccatgcgggcttttacaaattcttcctgataaaacacaaaaaggacagtcttgtgactgtccttccagtttcatcattatccgtatttacaaatgttcaataaactgaaccatgccctccaatgcttcctgctcgtccataccatcgcagacaaccgtaatctctgtgtcctgtctgatacatagactcaggataccaagaaggctcttcgcactgatctccttatcaccgtgtgccagtgaaactctgcatcgatactttaatgcttcttccgccagttctccggccggccgaaggtgcaggccatgtggtgtatgtattgtcacctgtgcgctaatcataaagatcaaacccccgttactttccctatgtcatgcctctattgtatgtatagtatagcatcttttactgaaaaaagcacgttctttttttagaatttgatgaaattttatataatttccattattttacaacaattaatcttccataatatgttcaaaggctacctggaacattttctgaatatgttcatccgccaatgagtaatatcgtaccttgccgtcacggcgtgtcttcaccagacgcacctgcttgagcatgcgcagctgatgcgataccgcggactgattcatctcaaggagcacagacagatcgctgacgcacatctcagactgagccaaggcgcagataatctttgctctcgtcagatctccaaaagctttaaataactccgccacgtcaatcagatcgtcctgatccggcatatgggatgcaacatacgcaacaacatcgggatgtacctgtgtctgattgctctcacttgtattctgttcatattcaccatttgctctcataaaatcaccactttcacatgaagcaattgtcatttactttctgttggcaggttcaatattaatattgcggcctttgatacgagcatgggacatcgcgttcagtacgtctcttgcatattccttcggaacttctacaaatgtatacttgtcatacatatcaatggtaccgatcaggctgccggcaataccagtttcaccggcaatcgcaccaagaatatcccccggtcttgccttctgattcttacctatattgataaagagacgtaccataccgtcttcagcacctgtatcaccaaaatcatccacttctacgctcttatcttcatcaccaagtgccattcgtagaaatgctgctgccagatcaagtgttgtataatcttctttctcaagcttctcctcaatcatgcggatatatggcttgagattgtcctcgtcgatcattcctgccaccttctcaaagatcttgtccgctttgacattggcaacatcattcaaggaagggacctgttttgcaataatcttcgtacgacaataacgctggatatctttcagcttataaaactcacggccggtgataaatgtgaaggctttgccattcttgccggcacggcctgttcttccgattcgatgcacataatattcatcatcctgcggcagatcatagttgaaaacagcatccacatcatcaacatcaatacctctggctgccacatctgttgcaacaagaatctctgtacggccgttgcggaaaccattcataacacggtcgcgctgctgctgtttcatatcaccgtgaagtccttctgcaaaataacctctgccctttaaaccttccaccaattcatcaacctgtctctttgtattacagaatacaacagaaagggctggattgtaaatatctaaaagtcttgaaagaacttcttccttattcttcggacgcacttcataataatactgctcaatattggcaaccgtcaattctctctttacaaccttgacaatcttggcattcttctggtaggttcttgcaatctccatgatcggctgcggcattgttgctgagaaaagcagtgtctggcgctcttcaggtgtctgtgaaaggattgtctcaatatcttcgcggaatcccatattcagcatttcatctgcttcatcaagaacaacaatcttcagatcatccaacttaatcgtatggcgtctcatatggtccatgacacgtcccggcgtaccgatcagcacctgaacacctgtcttcagagaacggatctgcttcacaatatcctgtccgccataaatcggcagtaccttaataccatgcataaacttcgccagtttacggatctcatctgctgactgaatggccaactctcttgtcggacaaaggacaattgcctgcacatgcttattcttcgggtccaccttctgaagcatcggaataccgaaggatgccgtcttacctgtacctgtctgtgcctgtccgataatatcctgtcctgtcataacttccggaatcgccttggcctgaatcggcgtggcctcttcaaagcccatctctgtcacagctcttaaaattctctcatctacacctaaatcttcaaatcttactggttccattttcaaacctcctgtatatgcacaaaaaaatagcttcagaaccttctcagatagcactacatgctgtcatcgttctcaagcatctcttttgcaaaaatatctataaaacaatgcgttacattaaaactatatcaatgatagcagaacagagattatttgtcaaataaattttaaaggctgcagggaatcttctggtatcctacagcctttattgaaaaatgaggtatttattgaactagcgaatcttgttggtacgtctccagatatgcatcttctcagcttctgcaatcagttcatctctaaactgcggatgtgcaatactgatcagtgcttctgctctctcccatgtggaaagacctttcagattaaccttgccgtattctgtaacaacgtaatgtgtattggcacgggtatctgtaacaatagaaccattatgtaatgtcggaagaattcgtgactgaagttctccgtttttattcataaatgtagaagacaggcagataaagctcttaccacctctggactgataagcacccataacaaaatctaactgaccgccggcaccgctaatctgctttgtacctgagctttctgagctgacctgaccaaacaagtcaatatcaacggcattattaatagaaataaaattgtccagtgcagctacagactgaatacagttcgtataatctacaggtgcagacatacattccggattattgttcacataatcatacagcttctttgtacctgctgcaaaagcatatacctgtctgcctctgtcaatattcttgcgagaaccattgatcttacctgccatagctatgtccacaaatgcgtccacatacatctctgtatgaacacccagatcacgaagatcggattctgcgatcatggaacctactgcattcggcataccaccgataccaagctggagacaagcaccatttggaatttcttcaacgataagtttcgcaacggcctcatcaaccgctgttgccttgcttgcacccatctctgcaatcggaggattgtcaccttctacaatatgtgttacctgagaaatatgtataccttcattgaaaccgcccagacatctcggcatgttctggttaacctctacaacgataatctgtgctcgcttgcacatgctggccatatgagaagcacttggtccgaagttaaagaaaccatgctcatccattggtgccacctggaacatcgccacatggatcggttcgacattctctgcataataacgcggcagttcagaataacgaataggtgcataaaaggcaaatccctcattcactgccttacgttcgattccggacatatgccaggaattccagcaaaaatgatctgccgggttctcaatatcaaaaatagccggacgccataatgcgattccgccacgaatcttcacatcttccagttccggcattctctctgccaatgccttatccaaagcaaccggatgtcctgtacaccagccataatctacccaatcaccacttgtaacatccttgacagcttccttcgctgtacacagctttgacgcataaagctttttgtaatccatattgtttcctccttctacaaatattctcccttttacttgttgaaccaatcaagatatttttttaacaatatctagtatagcacgattttatgaaaaggtcaataaattcgccgtatcaaaagctaaacatgcagtgtgcatgctaattatccgcgtatgaactatttaagacaggttttatctctcaccataccacttacttttcataaaatttatcaataatcggcaatattatgataatttaataacaatatatcggctataagcgataagatggtttttcttctccatagagccaatatctaagataatcatccgccacaatagctgccgcacttaacacaaaccaaaccgccgcatagggcagacagatttgtccataaagattaaagggtatccgactgtaatcccatatatccagtttcagccacagatttaaaattacccctgcacaaaattcaagaaaagtgatcatcaacatcgacagaaacatttgctgcagcagcgtatatctacccctctgcttctcattgaggcgtccgcataaaataaaacagataccgccgagaataaacatactccaatgagaaaatccccgggtaaacatttcaataccataataaatactgcccccgaatacaaataggaacaggaacttacacaaagctatcatttttctatcctttccgctgtctttacagacagacgccaactcctttatagtagtatagactttcaaacagctttttagtccttttgtccaatgaatatatcatatacatccttttcaaaatatcagatacctcacttgtctgcggatcaggccggttatttgcgaaacgatgtactagtattttctgacggagtgtgctacaatttcataggtatttaaatgaaaacatttttataaattatacactgcgcgtatctgcgcagcacttgaacaatggagcgtgatttatgtcactattagatttatatacatcctgtcagctctgtcccaggaactgcaaagctgacagacaacacggacaaaccggattctgccatatgccggccgatctcaaggttgcccgggccgcacttcatatgtgggaagaaccctgtatttcaggtaaagccggttcaggcgcaatctttttctccggatgcagtgtgggctgtgtcttctgtcagaatcatgccattgctgccggccagagcggcaagagtatttctatagagagactggccgatatttttctggaattgcaaacaaaaggtgccaacaatatcaaccttgtcacaccggagcactatgccccatccattgcactggcccttgctatggccaaggcaaagggactgcatctgccaatcatctgcaactgcagcggctattcttctctgactgctctgcgtattctttctgatcatgtcaacgtctggttgccggattttaagtattatagtcctgaattatccagaaaatattctcatgcaccggactattttacagtggcctgtcaggcgcttcaattcatgtatgaacaggctggtgatcccgtctttgacgacaacggtatcattcaaaagggcatcatcgtccggcatctgacactgcccggctgcatggaggattccagaaaagtcattcactatctccacgaaacctacggagacaagatttatatcagtatcatgaaccaatttactccggtttctgaactgctttcagattatccggaactcaatcatacaatttccgcttccgattatgatgctttggttgactacgccattgacatcggtgtcgaaaacggttttatccaggaaggagaaactgccaaagaaagtttcattccgccatttgacaacgaaggagtttaatatttatgtacaacaagaaaaaagcaactgataagccggttggaaaatcatccggtttaaaccattcatcttcaggcaaggcctctgaaaaacataattttccgaaacagaacgattcaaaaaaggcatctgatgtctgtcctgtccacaaaaagtgcggcggctgccagtaccagggcatggcttacaaaaaacagttatctctgaaacaacgacaggccaacatgcttctgggcaagttcggaacggtgcttccgatcatcggtatgaaagacccgcttcattaccgcaacaaagtacatgctgtttttgcatttgaaaaaggcaaagccatcgccggtacttatcaggaaggcacccacaaagttgtccctgtggaaagctgcctgattgatgatgaaaaatccgatgcgattatccagacaatccgcgaacttctgagatctttcaagattaaaacttacaacgaggattcaggctacggactcctcagacacgtattaattcgccgtggttttacaagcggtgagatcatggttgtgctggttgcatcctctcctgttttcccttctaagaataattttgtcaaagccctcagaaaagaacatccggagattacaactgtgattctcaatgtcaatgaccagaataccagcatggttctgggcgaacgcaatattactctttacggcaaaggctacattgttgatacattatgcggccatacatttgccatttcaccatctgccttctatcaggtaaatccggttcaaacagagattctttaccagacagccatggattatgccggactgacaggtaaagaaaccgttgtagatgcctactgcggtatcggaaccattggcatcatcgccgctgacaaagccaaatctgttattggtgttgaattaaatccagcctctgtgaaagacgccagaagcaatgcccgtcacaacaatatcggaaacattaccttctatcagaatgatgctgaacgcttcttaaacgaaatgcaggaacagaatgccaaggcagatgtaatcttcatggaccctccgagagccggttccacacaatctttcatggcctctgccatctccctgaatccggaccgcattgtttatatttcctgtaatccggaaacactggcaagggatctggaattttttaagaaacatcagtataccgctgagaaaattcagccggttgatatgttcccattcacaacccatatggaaactgtatgcctcttaacccgcagaaaataaggagttttcacttcttttcttgccaacggacaacaatttgtccacgaaaaaatccccaaggaatgaatatatccttggggattttttcgtctattattttgctgttgtttcagcagtttctgttgtcgtttcagcgacagtttctgtttcggaagctgctgcctctgctgcactttcgctggctgcagcactctctgtggatgctgcagtatctgaagttgtctctgttgcagcctctgtctcatgcagatatgcaacgtgatgtctgctatctttcacttcaatatctgctgtcagatcagacatataatcattcagcttgttggatgtgatggtatctttgatgttcacataccattcttctttattatctcctacaaagtaaatgatatgatagccataatcagattctacgatacctgtatcaccaggcttacgggaagcatcgaaaatccagtcattgaagtttgtaaccatctgaccttttttgactgcttcatacagaccgccatttgtattggaacctgtatcatcgctgtatgtcttggcaagctctgcaaagctgtcctctgttgcatcaccgttcttccagtcatccagaatctgctcagctttaatctttgctgctgcctttgcatcttccttagcctgttcctgtgcctctgcagattcagtctctgctgtttctgtttcaccagctgcagttgtttctgtctcgtcagtctctgccgcatcagaagatgaagtatctgcactgatcagaatctgtcgaacatcaacggtctttatatgatcaaggtatctgtctttgaagtaaacaacataatatgcattgttggatgtatcttcgatgactgttgtatcgcctgcctgacgatctgcttcaaataaccagttagcgacatctgtagggctgatagaggatttcttcttgcctgtattcagagaatcaacggttgtatcagatgcatacttatcataaactttctcgaaagaagcttcatccttgatcttggaaagcatctcatcagcttttgctttggcagctgccattgctgctgccttcgcttcttcttcagccttggctgcggcttcgctttcttccgcactcattgtctcagattctgtctctgtctgagtttctgtcactgcagtttcagaagtgctctctgcggctgtttcagaaatactttcagcagctgtttctgtctgtgcctctgtctcagtctcagtctcttcttccggcatatctgcttcaatcttgcagactctgtaatctacagaatcataattgtccttgttctcatcatagtaagtattgatctcgtcatctgtgacttcgatatcgtccttgacatcattgtaataagcagatgcaagaccgctcatctctacatatggtttgataccttcaagtgttgcatcactgccaaatacagacttgcaatattcatcttcactgactccctgctgctgggcataggatttaatggaagtgaccatatcgtcataatcagaagatgcatcatactcaaaacctttttcattggcttcatctgtcagtgcgtaaacattcttcagctgattgactgcctgctgctggaaataatcatcccatgtcattgtgtctgaatactgctgctgatccagcggtttggatgtatccagaccaaagtaagacagataactgccatatgtggaagcaaatgaattcagactgctgtaataataatagtcaaattcagctttctgaatttcatgatcgccaactgtaatatatgggccatgcttttcctgataattatcatagaacttccaggcagcaatacatacacaaatgatcactgcgagaatacaacctgttttgatgattgccttctccttctttgcctttttctcttcctcctgacgacgctgcatcttcaggtcatactttgtcattttcttctccgactttgtgttgtctgccggactattggatttgttgttcttttcagacatatcaactgccgcgatgcccacccttctggcaggtcccgcgtcgctccttcctactattaatttctaatattcttcatagcttacttctgtccaggccaacgacaaattgtcattgtcactggcggcatcttcaaatacccacataagtctggagccataagaagtattctccatacattcacgattaatgatcgtgacatgtgtctcttccgttatatctgtcaatgcatcataaaagccttctagatcattgccataatattccggaaaatcaaacacatcaaataggtattcttgtgctgaggattctgacgccataaactttccatttaatgtaatctctttcatcgtcctagtctccctctcattccgccatatggaatgcagtgctttaatggtaatagaatacgcccggtccacagcatccggcacctggacataaacagccgcatgccgcattcagacataaaatcttgcagcaccagtctgatacattgatggtcggcatcccgtatgactgtcccatatcctgataccactgtccaccggattccagctgactgagcagctgccgatactgcatgttattcgggtccaattccactgcttttctggcatgctccttggcattgatattgcttcccattcttgcattggcaagggcactcagataataccactgtgcattcctgttggaaatactgtcaagtacatgcagagcttccgtataacttccggcattgatataattggccgccgcacggaatttcagagaatcctcatcctgatattggttctgctgattctgctgctggctgccataaccgccataaccactgccatagccgccaaatccaccgaaactgccccaaaaatcctggccgccagctgaattaccatagccatagccgccataacctgcactgctctgccctgaagtaccatgctcacgctcattaataatctgattgtaagcagcctgcacttctttgaactttgcctcagccgcctctttattcggattattaatattggcgtcaggatgatacttcctgctcagtcttcgatatgctttttttatttcatcattgctggcatctctgcttacgccaagtacctgatagggatctgtcattcgttctctcctgccttatttcttttattatatactgaggcaaactttgcccatacaccggaataaagaatattccgaagtatacctgcatcctgcacaatcggcagacgctcaaatgccctgcagcattctgccatctgcatcatcagcatgttctgacattcactgtcaaagttctcgtgatcttttattgtcatgaaaggattatagttcccggacacggcatccttctctatatcctcataagcatccatcagataaataaatttgccgagaaaaaaacccatctgtctgagatctgatgcccaggcatcctcccggcagacaaaaatctctgccaacatcttacccgttaggcaggccgcctcctctacattgtcagaacaacttttctcgcatacagaaagcgccttcatataatcaacgactgcctgatgctgacgcggatacttctctctgatgccgcgatatgtctttgacagcagctgtgcagctgcataacgggaaagctttctgtcatcctgccaatcatccagcaaattgtgataggccagcaatatattcatatccgcacagtaagaagaaaaatcattccaccgctctgtatgctttttcatcggatggatcagacatcttcccgtcttctcatgcatttcatgttcataaacaccattcagaaggataacaagaaatgtcatatcatatgtcagcgtcaactgaccggcacgtccgtgaaggccgtgaagtgcatgacataaaccgcagtaataagcatcgtatgccgctgattccttaacttttaattccgccctgttgactgtaatatatccaaacatctgattcctttcaaattcactgttaaagtattgtctgcaagcgcatacatctatattaattccaaacaattcaaataacaattaaatgaatatgataattttataaaactctgagaaacaaatcgtgcaggtataaaggcaggcacaccagacctgccggtgtgcccgtgtcaaatgatcattgattatgccagtcttgccataaatgcttcgttgttgatgattgcacgtttgtgcgtacctgtgccgatcagacccttctcgtcataaacattcacttcaaatacaagcttcttgccgttgacttcctttaaaaggctttcgcatctgactttcatgccaatcggtgttgccgcaatatgcttgatatcaacagatacaccaactgtgccttcgccttctgccagttcagactgaacgctttctgcacatgtgccttccattaatgcaatcatactaggcgttgcataaacaggtaataaaccgctgcccaccttgctggctgttacatcttctgttacaacaatactcttctcattcttaattcctgcttccattgataaagcctccttatgatgtcgtattcttcaggactattcgtaatcgtcctcttcactgctcatatcttcgtcagactcggattctttttcctcatcatcttcatcctcagaatcttcatcagaatcttccttcatctcatcctcaaaaatgtcttcatcatcgacgtcaagggcaatatcataaacatcaccgccaatgcttggcttatcgtcttcatcatccgcatcctcgccgcttgaaaggatcttaacatctccgtccataagttcttcaactgcaacggaaagtggctttttgttcttataatccggaactgcagattctgcacctgcaataatctgccttgcacgcttggcagctgcaataacgatagaatatctgctgctgacgatcggctgctcgccctctttgacttcgctgttaacagcgtccattaattctgtataagatggatgtaacatgtatcattctccttttctatatggctgcagatctctctgcaattcttgaatcttcgcaccgttaaactgtgttctctgatgttctgtttcaatcagacggttcactgcatccacacagtgctccacctcatcattgatcacaatgtaatcatactgatcaacatgcgctgcttcagcacatgcctgggcaagccgtgatgcaatcacatcatcactctcagtcttacgattgcgaagtcttctttcaagttcttcaattgtcggtggtgtcagaaaaatcagaattgcctccggcaccgctttctttactgcaaacgcgccttgctgctcaatctcaagaatcacatcataaccggcagccagattctcttctacatactgacgaggtgtcccgtaagaatgttcgacatactgcgcatattccagaaatgcatcgttctcaatcatctgctgaaattcttcatcactcttgaaaaaataatgcacaccatgctcttcaccatttctcggactgcgtgtcgttgcagaaatggacagtttatatctctcagggtacttctcaagaagtctgccgacaaccgttcccttaccggcacctgaaaaaccagagataatcgtcaaaatacctctcttctgatcactcatcttcctcatccttttctatatctgttaattgttcctgaatatcccgtccctgataccgtccggcaattgtctccggctgcaaagcggataagacaacatgatcatctgtcataatgatcacggcacgggttcttcgtccctgcgttgcatcaattgctctgccttcatccttggcattctgaacaatccgcttgctgggcgctgaatcaggactgataatggccacaatcttggccgcattcaccatattgccaaaaccgatattgatcaatctgctcatcgcatactctccgattattcaatattctgaatctgttctctgaccttctcaatatctgtcttcagatcaatggctgtattggaaatcaacaggtcattggcctttgacagaatggtattggcctctctgttcatctcctgagcaatgaagtccagcttgcggccgacgcttccgccattcacaagtgttgtcctcgttgcctcaatatgactcttcaaacgaacaatctcctcatctacgcaaagcttatccgcataaatcgttgtctccatggcaattctgccttcatcgatattcgtgtcaccaagcaaatctctgaccttatcctcaagacgtgccctgtagtccgcaatgatctgaggcgaacgttcttcaatataagccacatacgccaacatgccgtccagcttggcgatcagatcattcttcagctgttcgccttcccggcttcttgtctctacaagaccctcacaggcctttgtaatcgccggctcaaggaaatgccataattcatcttcatcaacggtctgttcttctactgtcagaacctccggatatcgtgaaagtgcagaagtccgcacatcattctctatgctaaaatcttcagacatctggcgaagggcatccatatattccgctgccagttccctgttgtacttcagacagcttctgttctctgtatagtcttcataggtaataaaaatatccactttacctctctgaatatacttcttcaacagactgcggatggctgactcgaaaaagctcagcttcttcggcatcttgatcgtgatatcacaatatctgtgattcacagacttcatctctacaatgacctttctgtctttatcggcgatctcgcatcgcccaaaaccagtcatactctttaacatctggttcacctgctctcatggtattgcatatgccatcctcttctgccttcgattcggatggatatatatggacatatacactttattataaaacacaaaaaaatacaagtcaacaccaaaagcatactcgaacaatactttctgcaaaagttccttgcccctctctctttatatatggtatgatattatctgaattgaaaagaaaggaagtacatcaatatggctttagatggacttgttatatccaatatcgtatatgaactctcggagacactaacgggaggacgtattaataaaatttatcagccggaaccggatgcactgattctcggcattaagaataatcgtaccaattacaaactgttgatttctgccagtgcctctctgccactgatttatctgacagatgatacgccggccaatccggctgtagcgccgaacttctgcatgctgctgcgcaaacacatcaacggcggcaagattctttccattacccagcccggactggaacgtatcctgcattttcatattgaacatctcaacgaaatgggggatgtctgtgaaaagatactcattgtagaattgatgggcaaacacagcaatattattttctgccagccggatatgaccattatcgacagtatcaaacatatttctgccaatgtcagctccatccgtgaagtgcttccaggcagacagtattttatcgctgaaacccagcacaaactgaatcctctggaagtggatgagacatcatttatcggtaaagttcttgcccagcctcttcctgtcggcaaagcgatttacacaatgattaccggcatcagtccgttgattgccgaagaactctgtttccgggcttccattgattccggtgccagcaccaaagctttatcagaactggaacagctacatctttaccgaacctttgagaaattaaaagaagatatcattgagcatcgctatcagccgaatattgtttccgatgagggcacaccgacagagttttcttctactcagctgacctgttacggagaattacaggaggaggatttcgacagtatttccgaagttctgagatattattacgccgcccgcaatgcggctacaagaatccgccagcgatcctccgaccttcgacgcattgtaacaacagcccttgagagatgccgcaagaaatatgcccttcaggagaaacaattaaaggacactgagaagaaggataaataccgtatttacggcgaaatgttaaacacctacggctacagtctggaacccggtgccaaaagtcttaaatgtatcaactattatacgaatgaagaaatccaggtacctctggactcccagttaagcgcccatgaaaactccgtcaaatattttgaccgctatgccaagttaaaacgtacatgggaagccctgtccgtccagattcaggaaacaaaagacgaactggaacatctggattccattagcactgcccttgatatcgccgtctcagaagatgatctgattcagctcaaggaagaactgattcagtttggctatatcaaacgccattattccggaaaaaagggcaacaaaaaagtccgcattaacagcaagccattccactatatctcatcagatggcttccatatatatgtgggcaagaataacttccagaacgaagaattgaccttcaaattcgccacaggcaacgactggtggttccatgccaaaggcatcccgggctcccacgttattgtcaagagcgaaggacaggagctgccggaccgcaccttcgaagaagccggccgactggccgcttactactccaaaggccgtgacgcggaaaaagtcgaaatcgactacatccagaaaaaacaggtcaaaaaaacacccggcggaaaaccaggcttcgtcatctaccacacaaactattcattactgatagatccggatatccgaaacattcagcaggtgaaataaactggcctcggacgttggacttccaacaaacttttaattaaatataaaaaatctgactcgaaaacaagcaccccatttccttattcaaaagcaagtgcttccagcatggccggtacttaggcattgtcttttaatgccttatgtaccgctgccaatgctgggcaacgcgagtgtgcttgctttgaataaggaaatggggtgctatttcgagttagactttcaccttttactgggctacggcgtggcctttctggtaaatcacatctacgacttctgaaacatatttctcacatgttgcatcatccggtgcttctaccataacacggataaccggttctgtgccgctttcgcggacgaggatacggccttcactgccgagtttatctgcaacagcatcaacagcgtccatgacatctttgtcttctcttgctgtcttcttatctctgacgcggacattcttcaaaagctgtggataaatggtcacaggttctgccaacttaccaagagactgtttctcttccagcataacttccatgactttaatagctgtcagaataccatcaccggttgaagcatatttgctgaaaatgatgtgaccggactgctctccgccgatacgatgaccattctgctgcatattctcatagacatatttatcaccaacgtttgtcttctcatagttaatgccgactttatcaaaggctttgtaaagaccaaagttagacatgacagttgtaacaaccgtattattcgtcagcttgccgtgttccttcatatatcggccgcatacataaagaatcaggtcaccatcgataactttaccattctcatccacagctatgcatctgtctgcatcgccgtcaaaggcaaaacctacgtccagctgtttctctttgacaaaatcctgcagcacatggatatgtgtggagccgcagtctgtattaatattgaaaccatccggatggttattgatcacatacgtcttggcaccaagcgcatcgaatacactcttagcaatcatccaggcactgccgttagaacagtcaagaccgacacgcatgcctttataagaacgtgttgccagagaaatcagatagccaatataacgatttcttcccgcggaataatctaccgtacaaccaatcttatcaccataagctaacggtacttcaccggactctccgtcaagataagcctcaatctcagcaatgacatcttctgtcatcttctcgccacgatcattgatcagtttgattccattgtcataatatggattatgactggcagaaatcataataccacagtcaaaatcttcttccgtacgcaccacataagccacacttggtgttgtagtaacatgcagaagataaacatctgcccctgatgcagtcaaacctgcaaccaaagcatattcaaacatgtaactgcttcttcttgtatccttaccgatgacaaccttgcaggatttgtcccttgctgcgccgtaataccatccgatgaagcgacccactttaaaagcatgctcaactgtcagttgtttattggcttcacctctgaaaccatctgtaccaaaatatttacccattatatagatctccttaatttcacaatatcgtaactgttcagagccaagcaaaatttcaaaaaacaggtataaaatgcttgcatttttaagactgtttttgaaattttatttggcggatacgccacaccgacgaaatgcgtagcattttggaggttagctctgaacagttacacaatatctatacctgtccaaaacaatgacataaattcgaacacatacatatttattataacgcgttctgataattattgcaaacagttacgatgattcaattgaatattgctaatagactatcttgtaaaatatttttctttaatgatatccaccggcatatcctgccctgtccagattttgaaagccgcagctccctgatacagcagcatatacagaccattaaatgtcgggcagcccttttcagatgccagcttcaaaagcttcgtctgctccggattgtaaataacatccgatacaatcagttcctttctgaaaacatctgtattcttaatgaggcaggcatctgtattcggtgccataccaacggaagtaccgtttgtcagaatatcactggtctcaatactgtcatacagtgctctttcatcagacaggtcgtgcagtgtgaccttacaggaagtcctggctgtgatattggctgtcagcttctcaagacggccatagaattggtctttaatattgaacacacggatttctttcaatccgtctaaagctgcctgcacacagatagctgtagcagcaccgccaccgccaagaagtgtcatagtcttgcctgtcagatcataaccggcatctctggctgcttccatatagccgatgccatccgttgtgtggcctgtcaatacgccattgtcattcacaactgtattcactgcaccaatcaattctgccgccggagacagcttatcacaatatgtacacatcagattcttatccggcatggtcagattgaagccgcggacaccgagcactttcaggccttctactgctgtctttaagttatctgttcctacatcaaaagccagatacgcataatccagtcccaactgtctgaaggattcattatgcatcatcggtgaaatactatgggctacagggcttccaagaagtcctgttaatacggtatgtcctgtaattctatctttcattctattctacctccaatatcagacctgattcatatgcagtcttcgaataatatcatttctacgataccattcattatcgctgcaatacgcaccatacggagcatttcataatttcccaggaaacaatttccaatgaaattataaaagggagcatgccaaaacccgacaatgtcaggccaatggcgatactccctgtctgtattcctacataaattctttcaagaacgagatgaaacacgctccgcgagtctcacttgttatcgcgatatgtctgcactccgtttcggacattgcagaacaagcgccactggcgcttagcaacgtcaaagccacatgcaagcatgggctttgactcattatccgcgtaaattaaactctcttcagatattcgcctgttcttgtatcaatctgaatcttgtcaccgatttcaacgaacagcggaacgttaatctgagcacctgtttcaacagtacatggctttgtagcacctgtagaagtgttgcctttgaaacctggctctgtctctgtaacttcaagttcaacaaagagaggtggctcaaggtcgaagatcttgcctttgtaagacataatcttaactgtcatctcttctttgacaaacttcattctatcttcaacttcttcatgaggcatagcgaactgatcgaatgtctcctgatccataaagttgtaagcttcaccatcgtcatacagatactgtacttcttttctctcgatgtaggctgtttcaaacttcgctgtagggttgaaagattcctctctgataccaccgttcataattctcttatattttgttcttacaaacgcagcgcccttacctggcttaacatgctgaaactcgataacctgacatacatcattatcatattcaaatgtcacgccatttctaaaatcacctgcagtaattgtagccatttataaaatcctccttaaaatactcaattaaatatagtatataaaattatagcacttttttcaactattttttcattgttttcttataaaaataaagaataatccattccaatcgtcgttttaatacgatctgtatctcctcttttgggttgatcggcttcacaaggatgttgcggatacccactcttttggctccccagacatccgtaaataactgatcaccaatgaaaaccgtcgtttttttgttagtgccgatcttcctcattgcctgctcataaccattttttccgggtttaccggccttaaaaatataggagacacctatcttttcattgaacatcttcactcgaggctctttgttgtttgacaataagcaacaggaaaatccaatctccctcagccgcttaaaaagagcaatggcccgctcatcagccggagcgccatggggtaccaatgtattgtcaatatcaaagatcagtcctcgataaccctctttgtaaagtttttcataatcaatgacataggctgagtccagccattcatcaggataaaattgttgtatcatgatcaaatcctctgtttttgctgtttgctttttggaaaagcactatttttctctctgcgcataaaataaatagaaagccggctaaaggagcattgccatgcagtcattcccacagcccctctctgctgcgcaggaaaccgtttatctcagacagtatcaaaatggcgatatgcacgcacgggatattctcatcgaaaggaatctccgtcttgtggctcatattgtcaaaaaatatatgaactccggcaaagaaacagatgaaatgatctctgtcggcatcgtcggtctcgtcaaagcagtgaatacctataactttgaaaaaggcagccgactggcaacctatgctgcccggtgtatcgacaatgaactgctcatgctcatgcgcggcgatcgaaaactttcccgggaggtctccctttatgatcccatcggcacagacaaagaaggcaacgaaatcacgcttctcagtattcttgagcatgaggatgaagatatcatcgaccagctggataaaaaacagtctctccggaagctgtcaaaaattctttccaaagttctgacgccgcgggaatattttgtcgttatccgtcgttatggtctttacggccatcatgaaacaacccagcgtgagctagccgagcagctgaatatttcccggagttatgtttcccgcatcgagaaaaaagcacttgaaaagctccgccttcagctgaactaattgtctgatttttcagctcttcgaagcagatcctgatctctcagttcaataccaagatccacatagattttctgttttggatgcgggcagctttccatatcgctgccttcttcatcacagatacgcagtactttgacgggcagatccctgccatcaggcttcatgacttcaatcgtttcgccaacagagaatttatttctctgttcaagtccgtacattccctgactgttttgtccattgataatgccaagataagtatattccttaacataagtattgctgtcataaatctgggtctcatgagtcggtttgccaaagaagaagcctgtcgtaaactgtctgtaagtgcatttggcaatctgttcacgatagtaaggcaagttctgtctgtaaaggttctcatccttcagataatcatcaatagcttttcgataggtacgcgccacaacagccacataaagcgccgtcttcatacggccttcaatcttgaagctgtcaatacctgctgcgattagttccggaatatgctcgatcatgcacagatcctttgaattgaaaatataagtgcctctttcattctcatacaccggcagatattccccaggtctggactcttccatgaccgcatatttccatctgcatggatgggtacatgcgccctgattggcatctcttccggtgaaataattgctgagcaggcatctgccggaataagagatacacattgcaccatggacaaaggtttcaatctccagatcatccgggatatgctttctgatatcagcaatctcctccattgacaattctctggctgttacaactcttcttgctccctgtcggtaccagaaattgtacgtgccgtaattcgtattattggcctgggtactgatatgcacatcaatctcaggtataatctctctcgcaatatcaaacacacccggatcagaaataatcaatgcatccggctgaatcacttttaattccttaaaatattctctgacaccctccagatcctggttatgtgccagaatgttcgatgtcacatagaccctaaccccatgcgcatgggcaaagtcaataccttctttcatatcttcgagagaaaaattcttggattttgctctcaggctgaaaacttcgccgccgatatacacggcatccgccccaaagatcacggccgtctttaatacttcaagactgctggccggtactaataactcaggtattctcattgtcaattttctcctctattctgtcagtttcgtgctgatggtcaccccatcaccaacggttaatacagctgtttcaaattctttcatatgttttaactgccacagataatcccgcattctgctgtaaatagtacgattccgtcttgtcaccgcaaagcgggattctataatatcaccatcctgaagaacattatctgaaacaagcagaccgcccttcttcaatagtctcaacacctccggaagaaaatggatatactgtcccttggccgcatccataaaaataaaatcatatcccggttccagaccggccatcacttccagtgcatccccttcgatcaatgtaatgcagtcctctttgccggcacgtcggatattctccctagcaatcggaattcttttctcatatttctcaacagttgttatggttgctcccggctcaagacattcgctcatcaaaatggccgaataggcaacggccgttccgatttcaagtattctctgtggtttattcatcttcagcaacaccttcaacagactccctgtctcctgacggatgatcggcactctgtcagcccttgcctcacggccaattgcttcgatgatttctgattccctgctgtctaaagaatgcagatatgatgtcagtctgtcattaactatcatacttttctccttcattctgtctcgctacatacccaaatcatcagccgctgccgttttgctcaggcagaggctgcatatacacgcaatgcaaaaagctgttgcagaaccgaaaaaactttcgattctgccacagcccccgacttattctgttgacgtttctgcagtacctgatcctgccatcactgcaagcatctgatccatcgtcatcgatggactcagctcataattgccaggcttcagcatgcctttatactgagacaatccaacatgtataataaatgcatatttatacttaataagccctttcttatcaagaatggccgcaatttcatttgtactggcgccatcactgatctgaacaggtacaatctcctcagaagcttcagcaaccggtctgtcaccaaaaacttcatatgcaaagtcataggaccaggtgatcacacgaattgccaaaagaatcaccaaaatataaatgataacatttaatgcaacaccaaaagtacctacgaataatttctttatcataacgttctccacagcatccttatacttccatgataatcggaaggatcattggatttctctttgtctgtttccagaggaagtctcccagtgaatctctgatcacattcttaatcttactccagtcagaaatattgtgattgaggcaatcatccagtgcatcactgacaactcgtcttgcatcttccatcaatgattcagattctctcacatacacaaaacctcttgaaacaatgtccggtccggccaacagctggttgctatatttctcaagtgtcagcacaacaatcagcagaccattctgggacaacatctgtctgtctcttaatacaatattgcctacatcaccaacaccaagaccatccaccatcacacagccatgcggtacctgaccggtgatctctgccttttcctgtccgattgtgagtatatcaccggactgcatcagcataatatggtctttctgtacacccatagtctcagccagtttcgcaccggctttcagatgcttatattcaccatgaaccggaattgcatacttcggctttgtcaaagcatagatcagcttgatctcttcctggcaggcatgaccggaaacatgtgtatcctggaaaataacctctgcacccttgcggtaaagttcattgataacattcgtaaccgccttctcattgcccggaatcgggttggaactgaatacaatggtatcccccggtttaatggaaactttgcgatgtgtatttgctgccattcttgacaaagcagccatcgtctcaccctgacttcctgttgtgatcaggacaagcttatcatctggatagttgcgcattgtatcaatatcaatcaatgtattgtccggaatcttgatatagccaagttctgatgcaattgtaatgatattcaccatactgcggccctcaacgataaccttacgaccatgttcataggctgcattgataatctgctgtacacggtccacattggatgcgaaagttgcaataatgatacggcttttcttgtggtcatcaaaaatgcgactgatcgtcttgcccacagttctctcagactgggtaaaacccgggcgctctgcattcgtactttcacagagaagtgccagtacacctttctttccaagttctgcgaaacgaatcaggtcgatcatctcaccaaataccggtgtatagtcaatcttaaaatcaccggtatgcacaataataccggccggtgtataaatagccagtgccgcagcatctgcgatactgtgatttgtcttgataaattcgattctaaaacagccaagattaatggactgtccatgtctgacaacctttctctttgttgtcttcatcatattatgttcttttaacttgtgttcgataatacccattgtcagctttgtcgcataaacaggtgcattcacactctgaagaacataaggcaatgcgccgatatgatcttcatgaccatgagtaatgacaaagccctttaccttttctatattatctttcagataagtcacatccgggatcacaaggtcgatacccaacatatcctcatccggaaaggataatccacagtcaataacgataatactgtcttcatactcaatacaggtaatattcatacctatatgttcaagtccccctaaagggataattttgattttttcatttgatacgcctttatttgctttcaaaaaactgcacctccgttaaatcacaggattcatacaatatttcaaaagaaacaagacttgcatctattctgattttgctccgtccttcttgcggcattccgcacagtgcccataaagcttcacttcatgattactgacaacaaatcccgtcgtctgctcaatcttctgttcgagattatcaagcagatcttcctgaaatgcaaaaacttttccacagctgacacagatcatatggtgatgatgatggtgactcttctgattcggttcaccaatctcataccgtacataaccatcatccaaattcaacttgtcaatgaggttcatttctgatagcagctgtatattacgatagaccgtagccaggccgatatccggccagtcctttttcacaaggtcatagatttcctcagccgtcaaatgacactccggctgagacagaagcacttttaatatagccattcgctgtgaggttgttttaagtcctctttccttcagcagcttcctgaactcgctcaattgatcttctatcatgcttcttctgcctttcttttcctctgcaatgtcttgtagcgattgaaatttctgtatcaatcattcatatttcaaatcaatatcgtccagcatctgttcgaacactttggaaataacttccagttctgtgctgtcttcaacaaactcataataggcctcttcggtctcagcccccgtctccttcagaatataagcatccgcttcatcttcttcagaatctgtgaccagcagataattcacattgttgatcattgtctgttcgataaccattaattcgatttcttcatcatcgtctgttgttaatgtaattgtttttgttgccatgtttctactctccccatattgcatacatgcataaatccaactataactatatatcttccgaatcttctgattctgcctgattctccgaaaagctctgataatccagatacccctgcagaataaaggctgccgccatcttgtcaatataagtctttctgtcttcgcgtcgaacattaccctccatcaatactctttctgatgcaacggtactcatccgctcatcccagagaatcacttcaagtcctgttctacgctccagtgcctctttgaaagccagcgttttctcgacacgctcaccctctgtgtcgttcatattcttcggataaccaagtacaatctgttctgcttcatattcccggatcaaagcctcaatacgcgcatacgtctttcggagtttattctcgtccttacgagtaatcgtctccagaccctgagctgtaaaaccaagagggtcactgaccgccacgccaacagtcttcgaaccgtaatctaatccaataattctcttcttcatcatgggctacttcagattcacttcaatgtaattcttgagaagttcttcaagaagctcatctctttcaaccttcatgatcaggtatcttgcattcttgtaactcgtcacatatgtcggatcgccggacataatatatcctacaatctgattcaccggattataccccttctccgtcagggcaatataaactgcttcaagaatgtctttgaccgcaatatcagtctcattattcactttaaaatactgtgtattcttgttatctgccactcaatcacatcccttctgtcagatggctgattatccaaggttactactatcttaatatatatattccaagaattcaatcaattcttttacaaaacacaaattcttcatttaatttgctgttaatagtgccttttatcaccatgtttggtactaatccatccatttcaaaagcacagcggatataattcttactgtgtcccgtcatgtatttcgtaccgccaatttccgtttcttcctcaatgaggacaatctgctcctgatctttgcaggcttcaaggaaatcatctttcattctctctcccagtgcgatcagtttctcacttctcacagactggatctgcggatcaatctgattcggcatatctgccgctttggttccacgacgctttgaatacttaaagatatgcatatccgaaaaatgaaccgtctcaaggaatctttctgtctgtgcaaattcttcttccgtttctcccggaaaaccaacgatcacatctgtagtcaaggccggtctgtcaaaatactgtctaaggattccgcacttttcaaggtaaagtgccgttgtataatgtcggttcattctcttcagtgtttcgtcacagccgctctgcaatgacaaatgaaaatgcggacagatctgaggcactttgcagaggcgtctgacaaaattctctgtaatgatccttggctccagtgaaccaaggcgaattctttcaagtccctctattccagataacgcctcaatcaaatcgatcaatgcactgttcttaaaaggtccataatcttcctgctcatccgctgtatgttcaaagtcaagaccataggaactgatatggatacccgtcaaaacgatttccttgtagccgtttgccgtcagatttctgacctcctgcaggatatcttccatctttctgctccgcacacgccctctggcataaggaataatgcagtatgaacagaactgattgcagccatcctgaatcttgatataggcacgggtatgttcagacaccgtttcgatatgcatggcctcatattcatggctatgggcaatatccgccacataagcatctctgtcctctgtatgtctgttgtcctgaatatactgttcaacaatctgtacgacctggctcttcatgttgttgccaatgaccagatcaatcagcgtatcttcttccagctgctctttggccgcctgcacatagcagcccacagcaacaatgatgccatctgggttcttcttctttgctcgatgcatcatctgtctggacttacgatccgccatatttgttactgtacaggtattgatcacgtaaacggatgcctcctgtgaaaactccttcacttcatatccttcagcctcaaagcttccccgcatggcatctgtttcatattgatttaccttacatcccagcgtgcagaatgccactgttttcttcatattcttcctccatctgtttcattttgttgcaatttataaaatactcgcctattgacttttgtccattccgaatgtagtataatattgtaataaaatattaaccaaaactaaaggaggaacagccatgaaaacagttcgagtatgcctcgattccatcgataaagtaaaaggatttgtcaatgacatcagccgattcaatacagattttgatctgatctcaggtcgttatgtcattgatgccaagtcaattatgggtatattcagccttgacctttccaaaccaatcgaactcacaatccatgagagtgatgaaattgatgaaattctcaaggctcttcagccatacgttgtagaataggctatcacatgattcttcggactgctgattatcagcagtcctttttgttcgatacaagaccggatcggccggattcttcacaggaatgcatgcacatttctgaaccagcctgtatcaggcctttctcgcaattttattcgcagagaatcgtctctctcgtctcaatagccgtcttaagcagttcatcaatgacatccaccagatgatgttctgaacgttcaatcgcacggacattcggcttcgtaaccggatgctttgccacaaatattgtacagcagtcttcaaatggctgaatggatgtctcgaaagcgccaatcttctctgaaatctcaacaatatcattcttatcaaagccaatcaccggacgataaaccggaagtgtacaaacagcattggttgcacgcaggctctgcattgtctgactggccacctgaccgatactctcaccggtgatcaatcctaaagagccttcttccaaggcaatatgctctgcgattttcatcatataacgacgcataatgatcgtcagctcatcatgcgggcatttgtcataaatcgccagctgaatatctgtaaagttaataacatgcagattgatcggtccggcataagcggcaacaattttcgcaaggtcaataactttctgcttcgcacgttcgcttgtatatggcggtgcgtggaaataaactgcatcaatcttaacaccacgttttgcgatcatataaccggctacaggactatcaataccgcctgataacaataatgtagcctttccgttcgttcccaccggcatgcctcccggtcccggaatagaaatcgagtaaatataggttcgctcacgcacttcaatattcagtgccacatccggattgtggacatccactgtcatatctggaaatctgtccaacagatattcacccatatccgctccgatctccatagatttcttcggataactcttatcggctcttcttgcaaaaaccttaaaagataaatgctgatccggataggttctttccatataatcaccggttacctggcatagattactccattcattgttgtcacacagaacaaccggacatatggccacaatgccaaatacccttgaaagtgctttgatcacttcgtcataatcatattctgtcagcgcttccacatacacacggccctgttcctttgtaacttcaaactgaccgtctactttacgcagtgagaatttgatctgatccatcagggcatattcaaacaaataacgattcttgcccttgatgccaatctcaccatacttaatcaaaaaagctttatacacgtttgcctccttttttcctgccgccaggcgtataacgtctaagcatcggcaacagcctgctaagctgtgccacgcattcatctatttcttcctttgttgtatcgaatgaaaaactaaagcgtacagttgcatccaggtatcgtttttcaacaccgattgcctttaatgtgccgctgatggccggatgatttgatgaacatgccgaaccgctggacacatacacatgtgtctcctcaagggcatgaagcagcacttctgcccggatatcctgaaagctgacactgaccacatgcggtgctgcacaggcatcctgctgatcttctgccggccggttcagactgccgcggctccttccgccgttcaccaccgttccttccagtttctctatctcttctataaaataactgcgtataccgtaaagatattccagtttattctcaaaatctgtatattcaatttctgcagctttcgccattccggctactccgggcacattctccgtacctgaacgcatgcctttctgatgaccgccgccaagcatcaacggctgtacttttactctgtcacgtacccacaaaaatcccgtgccttttggtccatgaatcttatggccgctgacggacagcatatcaattcctatccgtttcggatgcaggacgactttgccgaatccctgaatcgcatccacatgaaacaatgtgttcggattacattccttgacaatcgctgctgcgtctgtaatcggttcaatggtaccgatctcattattcacacacatcatagataccagaattgtatccggtctgatggcttctctgagtgcatcaagatccaccagaccatatgcattcacaggcagccacgtcacttcaaagcccatctgttccagaaacatcatcggctgatacacagatgcgtgttctatccgggtcgtgatcagatgcttgcctgctctctgattcgccaatgctccgccaatgattgccagattattggattctgtgccgcccgaagtaaaaattagttctttctcttcaactttcaaaatacctgcaagtatttctctggcgcggcggatataccgttccgcctccacgcccttcatatgcaatgaagaaggattgccgtaatcttcctccatgatcttgttcatcagctgcacaacctcaggataggctctggtcgtggcagcattatccatataaacttccatataaaattcagtcctcttccagttcaaacatcaaaatggagagcattgtcagtccggccgtttctgtccgcagaattctgtgtccaagggtaatcggtatagcaccggccgctctggccgcctcaatctcactctcttcaaatccgccttcaggtccaatgaatattccgattgaatgtttgccatggagggcacgtacctgatcacgggcatgctgcataccctctgctttctcgtaaggaatcaatgctgcatccaatccgttgcacatccgaagtgctttctcaaaactgatacatgtcgcaatctgcggtatcaatgctcttccagcctgcttcgccgcactctctgcaatgctctgccagcgaagacgtttcttctcttccttcttcggatccagcttcacaacagcccgcttcgttgcaacaggaactatctcatagactcccagttccactgccttctgaatgatcagttccatcttgtcagccttcggcagtccctgaaacagataaatcttcgccggcaactcaacgaaagaatgccagctgtcaacaatatccagacgtacttcttccttagtcagctctgcaatccggcaaaagtaatccatgccctgtccgtcactgaccgttacttcttcacccggtgtcattctgagtacgttcctgatatgattgacatctgtgcctgtaatcacaatatctttatcactaatctgatctgttccaacaaaaaatcttggcattcctgcactccctccatcttaaactgttcacgtaacctttatggcgcttttgccattatagcatgaaatgaacaacttattcaagcctgttcgattttattttctggctgtaaaggcaacccagtcaccggaatgtgtcacttcaagaatctcaaagccattggcaagcagcgcttctcttacatcatcctcttttgtattgatgatgccggatgaaacaaataatgcccccggcttcatattatctttgatcacacctgaaagcggaataataacatctgcaagaatattcgccaacacaagatcatatttctcatcaccacaggcatgtctgaaatccacatctgtaatgatatcaccggcttttacatcgtattgattcatattaatatgattgactctggcattttcaatggctgctgaaaccgcattcggatccacatctgttgccatggcttcaccggcaccaagcatcagtccaatgatggataaaataccgctgccgcatcccacatcaaaaagcttctgaccctctttcagatatttcttcatctgtgtgatgcaaagccgggttgtatgatgcatgcctgtaccaaaggctgtacccggatccaactctacaacaagcgtatcctccgttgtgtcttccggcaacttctcccatgtcggtttgataatgatcttgtcatcgactttgaatggtttccagaatttcttccagttattcatccaatccacatctgctgtttcagatttctcaatggttgcatcaccgatatcaacaaaatccgccaattccttaaccgcttccgttacttcctgaagtgtttctgcatggtctttttccggttctatataaaatgatacataggcaacaccatcatcctctcccagatcaggcagaatgtcgatgaacatctttttcttatcctcatcagaaagcggaatcttgtcttctatctcaattccttcaattcccatttcgcccaatgtatagctgatcagatccactgcttccgttgtggtcttcatacgatatttattccatttcatatccgttattctccttttcacaaattctattctaacgcacaaaagggcattttgaaattctatttttcagaatttcaaaagccctgtgtttatttgattcttcactaatcttcaaaagtttcttttaacttttcttcgactttttccttgaaagactttttcttcttgccttcattctcctccggcttgtatatgcccttcatagcgtcatcaaacttacgaagaagttctttctgttcattgttcaatttctcaggcacctgaacaatcagtgtgacataatggtcaccgcgcagattcttgtttcttctggaaggaacacccttgcccttcaatctgatacgtgtatctgtctgtgtccccggtctgattgtctgtgtgatctcgccatccagtgtctgaatcttgatatccccgccaagtgctgcatccgcaaatgagattgggactgttgagaaaatatcataatcctgtctctggaaaatcggatgactgtctacttgcagaccaaccagtaaatcacctcttggtccgccattcttgcccggctcaccgaagccagcaactctgacactgataccattgtcaacaccagccggaattgtcactttcaacggcttgcgaatcttcttgaatccctgacctgcacatttcgggcacttctccttgacaaccttgcctgcaccgccgcattcaggacatgtctgcacattacgtacctggccaaaaagtgactgctgtgtatatacaacctggcctgatccattacacttcggacaagtctgcggctgtgttcctggtttggcgcctgttccgtgacatgtttcacattcttctttgtaaccaatctcaatattcttctcaacaccaaaaacagcttccataaagctgattctcatattgatcttcacattggcaccctgcatcgggccattatacgctcttctgctccggctgccaccgccaaaaagatcgccaaatatatcaccgaatatatcgcccatatcgccgccaaaatcaaacccgccgaatccaccggctccgccgccctgttcaaaggctgcatgtccgaactgatcatactgtcttctcttatctgcatcacttaatacagcatatgcctcggaagcttctttaaactttgcctcagcttctttatcccccggattggtatctggatgatatttcttcgccaatttacgataggccttcttcagctcggcatcgctcgcattcttatctacgccaaggacttcataataatctcttttatctgccatctgagattctccctctatgcttggaaatggcgaaaagtcaagtgttaccacttcacttttcgcctttgtgtttattgcttatctgttatattatacgtcaattttagacttctgtatagtcaccatcaacaacatcatcattattgttctgataattctgctgaccagcatcaccctgagggcctgcctgtgggcctgcacctgcattagggttctgtgcctcatacatctttgtgaagacaggctgtgcaacattcatcaatctttccttgccagctttcaattcatcgatctcatcatctgtcatggattcgatgtttgtcttctcaatggcagcctttaagctatctatttcagcctgaacttttgctttgtcatctgcactgatcttgtcgccaacttctttgagagcgttttctgtctggaataccattgcatctgcatcgtttcttacatcaataccctctttacgttttttatcctgagcttcgtattcagcagcttccttaacagccttatcgatctctgcatctgacaggttagaacctgctgtgattgtgatatgctgttctctgcctgtaccaaggtctttggcaaatacattgacaataccgttggcatcaatatcaaatgtaacttcgatctgaggcacaccacgtcttgcaggagcgataccatccaactggaaacggccaaggctcttgttgtctttggcgaactgtctttcaccctgtacaacattgatatctacagcagactggttatctgcagctgttgagaagatctggctctttcttgtagggattgttgtatttctctcgatcagatgagtagcgataccacccattgtctcgatggacagtgtcagaggtgttacatccaataagaggatatctccggcacctgcatcacctgcaagtttaccaccctggatagaagcaccgatggcaacgcattcatcagggttcagggatttgttcggttctttgcctgttaactgtcttactttatcctgtacagcagggatacgtgtagaaccacctacaagaagtaccttgctgatttcattcatttcaagacctgcatcttttaatgcattctgaacagggataactgttctttcaaccagatcatgtgttaattcatcgaatttagcacgtgtcaggttcatatcgaaatgcttaggaccttcagctgttgctgtgatgaatggcaggttgatattcgttgttgttgcgcttgaaagctctttcttagctttttcagctgcttcacgaagtctctgcatagccatcttatcacctgagagatctacgccttctgttctcttgaactcggaaagcatgtactgtgtgatcttgttatcgaaatcatcaccaccaagtcttgtatcaccatttgttgccaatacttcaataacaccatcaccgatttcaatgatagatacatcaaatgtaccaccaccaaggtcgtataccatgatcttctgttcattctcattatcaaggccataagcaagtgctgctgctgtaggctcgttgataatacgttttacatcaagacctgcaatcttacctgcatcctttgttgcctgtctctgagcatcgttgaagtaagcaggaactgtgataacggcttctgataccttctcaccaagatagctttctgcatctgctttcagtttctgaagaatcatagctgaaatttcctgtggggaatatttcttgtcatcaattgttactctgtagtcagaacccatatgtctcttaatagaagagattgtgtgatctgcatttgtaactgcctgacgttttgcaggttcaccgacaagtctttcacctgtctttgtgaaagcgacaacagatggtgttgttcttgcaccttctgtattggcgataactacaggtttaccaccttccataactgctacacatgaatttgttgttcctaaatcgataccaatgattttactcataataataacctcctgaaataaactaaaaatctatataaatgaaacttgttgtcttattcttattcagcaaccataaccatgctgtgtctgaggactttgtccttgtacttgtagcctttctgaagttcctggatcacaatacctgattcatattcttcacttggctgctgcataaccgcattgtgaagcatcggatcaaattccttgccctgggcctcaatcactgtcacaccttcatcctcaagcacctttgtcagctgcttgtagatcatctcaataccctgggcaaatgaagactgcttatctgcatctgtcatggctccgagacctctttcaaaattatcaaccaccggaaggatcttcagaatgaaatcagaagcaccgatttcataattctgtttcttctccttgtcagtacgttttctataattatcaaattctgccatctggcgaaccagacgatctttcagttcttcgatctctgcgtctttcttatccttcttatctttcttgaagaactttgacttcttctccggtgcctcttccgctgattctttctcttcagcttcaggtgtttcggaagtctctttctcttcggctgctgcctctgtcgtttcttcctgctcttcaaccggctgttctaaatctttctctttattctgattctctgccaaagcctgtcacctcttattctttcttgtctttcttaaatattgtatccagctgtgtcatcactgtttccagattattcacaaccttcttataatccatacgtttcggtccgataatacctatcgttccctgtacgccttcttccaattcataagttgctgtaacgatactgcagtctttcatggactgaaccggtgattccgatccgatataaacctgaatgccatgcttattctcatcattctcacctgctgtaatcagttcattaagtccctgtttctcttccagcgtatataaaagctgtcctgccttctctctgtctgccagctcaggatacttcagcagattcgttgtaccacttgtataaatctcggtatcatcctcttcctgaatcgcttcaacaatcgtatcaatcagatcaccgataatcttacgatgtccctgtgcctgccgcttcattgtctgaagcagttccatattgatttcctgaaggctcagcccctgaagataagtgttcagcagaagattcagttttacaacttcctcttcctcaacaagctcatccacagtcaaaatcttgttcttgatgatgttgccttccagcatcatcaccgccagaatctgttcttcattcacccttgtcagctggataaacttgagcttgttcttctggctctggggtgctgtgatcaacgaagcataattcgtattcgttgccaacagcttcaccacctgtttcagaacctgttcgagcttgtcgaccttctgaaccatcatctcattctgtctcacaacctcttcggacttaaccttcatcagattgtcaacatagaaacgatagcccttatcagaaggaatacgtccggctgatgtatgcggctgtaaaatgtatcccatctcttcaagatccgacatctcatttctgatcgttgctgaactgagcttcaaatcggtgaatctggaaattgttctcgagccaaccggttcaccggtttcaagatatgtctgtataatcgcattcaagatcttaatcttacgttcatccagttccatcgatttctcactccctttcattgttagcactcatcatattggagtgctaacatcttctgtatacaaaaatatcaccatagtcaccttttgtcaaggggaaaatgatgatttttttgtttttttcataaagttcctgtaactgttcagagctaacctccaaaatgctacgcatttcgtcggtgtggcgtatccgccaaataaaatttcaaaaacagtcttaaaaatgcaagcattttatacctgttttttgaaattttatttggctctgaacagttacaagttcttatttatttatagaagaaaatccgacaaaatccaattgctgacatctgttcctgcctccgaaaaagccagtctgccctctgatggatgaaagacaagaaaaccttctgatatatattttctgataatgtctccataaatatccatcatgctctgtccaaacttctcagtaaacatccgatccgatacgcctgccgtgcatctgagccccaaaaacattgtttcttcgatctgggcctttctgtccaggatttcttcctgacaatatgaccagtcatgcatatagcttgtcatgtccgatacattcgaaaaacgtctgttgcccaccatactggccgcccccagtccaaggcccaggtaatcctttctctgccagtatatcagattatgccggcattcaaagcctttgcgggcataattagaaatctcataccgctcataccctttttctgccagaattcttttggtcagatgatacatctgccgctcgctgtcttcatccggcaatgtcagtattgctgcttttccctgctgcccgaccacaccatcagcaataatgccgtccacatccgcttcgccgctccgatcatcaccataaagatcccagaacggtgtttcttcctcgataatcagactgtaagcagacaaatgttccggttcaaatgctgctgccttgttcaatgtatccagccatgaagctgttgtctggcccggcagtgccgacataagatcaatattgatattctcaaagcctactcttctggccgcctgataattctctgcaaactgcttcgccgtatgaatacgccccagatatttcaattcttcatcattcatagactgaagtccaaaacttagtctgttgatgcctgcattccgataaatcctgagtgtctcagcatctgttgtcccgggattgcattccatcgtccactcaccgacaggcgaaacatggaaggataccctgacagtatccagcaattctgtcaattgctgcccggtcatcaatgacggcgtgcctccgccgatgaataatgtttctatattataatcctgatatactgctcccctggctttgatttcttccttcagtcgttccagatagatttcccgtccagcttcatccgacggaaaagagagaaaatcacaatacctgcatttccgtacacaaaacggaaaatgcaggtataagcccaggggacgtttgttcttatccgccatattatttctcatcaagtttcagcacgctcataaaggccttctgcggaatctccacattgcctacctgacgcattcgcttcttgccttccttctgtttctcaaggagcttacgcttacgcgaaatatcaccgccgtaacacttggcaagcacatcctttctcatggctctgaccgtctcacgggcaataatcttgctgccgatagccgcctggatcggaatttcaaaaagttgtctcgggatttcttccttcagtttctcacacatcttgcggccgcgttcataagccgaaccctcaaagacgataaatgacagggcatccacattctctctgttgacaagaatatccagtttgcagagttctgaacgttcataacccttcaattcataatcaaaggacgcatatcccctcgaacgtgatttcaatgcatcaaagaaatcataaataatctcattcagcggcaactcgtacttcatcaacgctcttgttgtctcaatatattccatgccaaggtatacaccgcggcgttcctggcaaagatccatgatcggcccgataaaatctgttgtcaccatgatctctgcagacacaatcggctcttccatatattctatttctgaaggatccggcatattcgacggattcgtcagttcaatcatctcgccgttagtcttatggattcgataaacaacggaaggcgccgttgtgacaagatcaagattgtattctctttccagacgttcctgaataatctccagatgcaaaaggccaaggaaaccgcatcggaaaccaaatccaagagccaccgatgtctccggctcataatataaggaagcatcgttcagctgaagcttctccaacgcatctctcagatccggatacttggcaccatctgccggatagaggccgcagtaaaccatcggattcaccttcttgtaacccggcaaagcttctgcacacggattctccgcatcggtgatcgtatcaccgactcttgtctccttcaggttcttgatgctggcggtcatataaccaaccatacctgccgacaactcatcacacggaatatactggccggcgccaaaataaccgacttccactgtctcgaactctgcccccgtcgccatcatccgtaccttcgtacctttggcgatcctgccttcacgcaccctgaaaaatacaataacccctttataaggatcataaacagagtcaaaaatcagcgctttcaacggcgcattctcgtcgcctgtcggtgccgggatcttcacaatgatctgttccaaaacatcttctatattaagtccattctttgctgaaattctcggcgcatcctcagcttcaataccgatgacatcttcaatctcactgacaaccctgtccggatctgcactcggcagatcgatcttgttgatgaccggcatcacgtccagatcatgatccaacgcaagatagacattggccaatgtctgtgcctcaacaccctgtgccgcatccacaacaagaatggcaccatcacaggctgccaggcttcgtgaaacctcataattaaaatccacatgtcccggtgtgtctataaggttataaatatattcttcgccatctttggctttgtatacaatacgtacagcctgggacttaatcgtaataccacgttcacgctcaagctccatattatccagtacctgtgcctgcatctcacggctggtcagagtacctgtcttctcaatgatgcggtctgccagtgttgatttgccgtgatcgatatgggcaatgatacaaaagtttcttattttactctgatctatatgcactttacattcctcctgctttttcactggaataagtatagcatacacagccaaaaatgtacaacaggttattttcccgaaagcaccgcatacaggatatctgccagcggttccatagcatttttggcttctgcaacggtattgttctgggctcccacctctacaagcagtgaacgcggcttgaaatgcagattataccgataagccctcagataaatgtgacgtactagttcaggaaaataagctttcgccttcaactgcagctggaggctgaaagccagattgtccgataaattcgggttttgtgcaaaatcattgacatcaccattcgaatttctgcacaagccatttaaaaacataatctttgccgtcttctttccatttatttccgtttccagatgcacattgtccggaaccccatctctatgtaaatcgatcgtcacttctattgaaggatgttcatccaatagattctgcacagccactgctgcctgggaataagccttatttctgtcttctttgccgtcttgcatatcataaacagataaatcatggcagactgccacatgatatttttcctccagcacttttttcagctgttctcccacacctaccactgtatcatccgcattgcccgcttcactgtctgcataaccttcctgggaatgtgtatgataaatcagaatttttggttctgctccatccaaatcaatggtaagatccttttgcagcagatctgttccgttaataagcttgctatttgccgatgttgtcggatccactgtatagaaatgtcccaaaaggaaatcataatccatcaatgctttttccgaataaatttctcctgtagggacaccggccaacgtttctacatattctgttccggcttcactttctgtttctgctctttcactatcttcctgtgccttcctgacagcttccgaattctccccggccatatcctccagaagcaccgctgtattttcctctgcaacagcctccagatcttccggtgacggcatatattccgccaccctatactttttttgtttgccgtcataataaaaggctgcaagattcgcctgattgacggcacctttgagaagtctttcagaaaacctgcgtcccatctctctccattcccatttgctcccaatctcaactccaccaagctgcagcccgatatcagctgccagtaatccagtcaatatccaggcaccaacccgcaccagtcctgtcctttttaacttcatacatgcccccctgctgtcagccgattctctgtctttgtccacttctatacagtatattcacaaacagacagattattataatcgatggcacagggaattgaatgcctcagaaatagtatagctgattcttcctacggcttcatctatatcctttggcgtaacaaacaaatttgacatttgcggttccatcaattcccgcatcagcaggtaattttcttcatgattaaactgctcggtcactttcaccgcttttttcagcatttcattctgatgaaggacccctatcagtgactccatcgtatctgccacaattgttgccgcatcaatgaccgtcggcatgcctacggcaattactggaattctcaaatttctttccgacaattcatagcgtttattgccgatgccggctccgggacgaatccctgtatctgtcagctgaatggtggttaccagccttcgtatacttctcgctgccagtgcatccaccgcaatcaacagatccggatgaacctctctgacaagtccatgcagtatctccgccgtttccatgcccgtctgtgacataaccccggggatcaccgcacatacattccccatatccttcacaaccaccgaatcccttccgtatttttcaaacagatgccttgtaataaataaatgctccacaacaaggggccccaaggcatccggtgtgatttcccgatttccgatacctgccaccaaaatttttttatctttcagatccggcagcagcttctgcagctgacggcacaatacccctgtaacagcctgttgatagtcatcattcccatccggcaaatgcaccgcctcaactgtaatatatcttcccatgggttttccgatcaccttttctccctctgcatcgacaatcttcacatctatcactttaatctgatagtccggatcaaccgtttcctctatttcaactcccggcagctgctgcccgtcatgctcactgctgttataaaagcgctccgcatactcaatcaccagatcactgtgcatattctcattaacaaaatccatatcaagctcctatctgattctatctttttcacaccttctctactaattttttgcaatcttttttatttttatacttgacaaatcttgtctactcttatattatatagaagtatgtttacattagacgtccgtgtccgggttaatgcataacacatctataaaatgattatcgtttggaggtgtacgaattggctaatatcaaatctgcaaagaagagagtccttgttaatcagacaaaggctttaagaaacaaaatgattaaatcaggtgttaagacagctgttaagaaagtagatgctgctatcgctgctggtgataaagaagctgcaaaggctgctttattaagcgcaacaagcgtcatcgacaaggcaacatccaaaggtgtttaccacaagaacacttcttccagaaagatcggaagaatgacagttgctgttaataagatgaactaatatctgtaaagataaacttaaaagaagtgtacaaaccctcagtacacttctttttttatgcaaatagtgacgcaaaagcatgcatgcggcctattctcttccaaatagtaaatggctgcacaccatgcacagccattttatcattatgccctgctgtacttttgtatcatcagctctacagccaggcggtccgtaatccttccggtcttgatctcctcttccagctccgttccatatgccacggcctctctgagtgcagtaatctcaaaatgtcttccaagagaaatattccgcttcacgataaaatcccgaattgccgttttctccgcaattgccgatgccggatatcccttcactgcaagatccctgacctcatacagcgtattaaactgtttgatcatcagatacaaaatacgcatcggcggctctttcaaggccaccagatcatcatacagctgcattgcccgtttctgattcttctcagccaccgcactgatcatatcaaaaactttgttctctacaaacacacaacagaccgcatccacgtctgccttttcaatcacctgacgatgccccacataacaaatgagcttctccatctcctggcgcatgccattcatatcatgctccaccaactgaaggaaatactgcatcgtctgttcctgaatcagtttgttctctctcttaacaattcctccgagccacagcatcagctgtttatccccgggcattgtcaggttcgccgcatatcccgtcgatgaaacagccttaaaaagcttacttcgcttgtccacctcagattccacaaaaacaatacatgtcgtctcaggaatatgtttcatatattctgccagagtctcatgacccgacgtcttaaaaaatccactgttctctacaatgattaaccggtaatcactgaaaaaaggaacggtatccgccatggctgtcagttccttttcatcaatacccttgccctcaaaacaggaaaaattcatggtatcgccctcgttgatcattgctttcttcagcttatccctgtactgattgcgcagataagcttcatccccatataataaataaacattcttaaatgttttcgtttttaagtgttcgtttaatgtcttcataaacgcctccatttgtcaactgttatgagtgtaccacatttttctgtcttatttcaaccatgtctgtagaagaaactttccttttttgcagggcattatcaccgctcccgtcttcattgttatatagacctgcatatcggctttctgcatccgttccagcgtttccggcgccggatgaccgtatctgttttttctgccgcaggatataacggccatcttcgcctttgatgccttcaaaaattcttcactgctggaatatccggaaccatgatgcgctgttttgagaacatccacatcggatattccgtctttgttcaagacattctccacatcacttgagatatcgccggtaaataaaaatgtcgtaccgaaagcattcacccgcagcaccatggactgatcattctcagacttttcttttgcttcccgcccgggataaaggcaccaaaactgccagccgccgctctcccacctggtgtcttcattaatatagatgacttgcgcaccatttgacactgccagatcagccagttccctaacggtctcatctgtttcggagaccgctgtcagtacaagatgtcgaatcttcttctccagcaaaagttcccgaacaccggatatgtgatcctgatctccatggctcacacaggcataatcaatgcttttctctccataataattcataaaaggaatgattctgtattttccaacgttttggacatctgaactgccgccatcgatcagccatgttgtcccattggctgtacgcataaatatgccgtcaccctgccccacatcgataaacgccaccatcggatacatttttctgatgggaattagaataaacagaccggccaacatcagcagccaactctttttaatcaatatttttccgatatccgtatgcttaaaccatttgtgttccggcaaagccagcagcgcaaatccgatcatcaatccatagtctatcaatagccacgctgacggcggcacgcctgttctccataccgaaaaaggcataataagcattttctcacacaaaaatcgattaatctgcaaaatgaaatgcaacgttccgccgcaaaatccggccatgctgattgaaagcagactgacaccgcctgcgccaagggccattggtacaaatagattcatcagcggcaatacaagcagattcagaaaaaagccgactagcgggactgcgccgtaacaaaatgccgtcagcggaagtgttcctatcgtcactgctgcggatgggcctatataacgtatcattctttctatccattctcttatcgttgtctttacccccatggacttttttaaatgttctattttataattcctggtctttgcatattgccatggaatacatttctctatggctggccagagaacgccaatagacagcaccgctgcaaaagaaaaccagacacctgtctgcagaatagacagaggccggctcacgaaaagaatcaatgctgaaaaactgagtgcagaaagaaaatcataagtacaccccaggtaaacagctcccattcgtacaagaaacataataactgcccgttcagttgacggtccaaatcctgtcatcacaccataactgagcacaataaaccccgaaaggcacgcactgcccttcaaccctacccccagacgcttgagaagtgtgtatacactcataccaatgatggaaatatgcagccccgaaattgccagcacgtgcacaatgcccgcctgtatatacaactgctctgttttctcatccatttctgctttatcccctgtcagaactgcacggacaacgcctgcatcttcctcgtttaaaaatgattgatagcgtccgcaccagaatttctttattttatcaagcaacgccggataagaatttcctttaccgacaatggtataaccatccggccgcatgatataagcaatgccttttgaacgataataagacgccccatcaaattgtcccggattggatgctctttcaggtttttccagtataccgcgcacttcaatatcatcgccgactgccaccggtgcatctttttccatataaagaagcagcttcttttttcggccgttgatatctgcatccgacaatgtgactgccagcgttttctccttcgcttcactttggcagatcattccccttgtatgtatgaactgattttccatagatgcatctttgacatctgtcattgcatgatcaaatatgacaaaacccgacacgaaaaaaacaggcagcaaccaaaacagccgtttttctttccagggctgtctgattctgcctgttatccatacaaaaagcacaattcctgctgtgccgtaaaagagcttctgatcaccggaagcccaaataactcccagtgtatatgcgaccccaacccacataagaggtctcgacatatgtcattctcctttattgtacaaccaaatccggttttgctgtcatttcattcatcaaaacgacaccatccggttcttcctctattaacttgccatccaccgttatccggacacgctgtatatcactcaattcggtcagcgaattaacaataccatagacattcaatctgaaatcctgtccgtctattttgttcaggaattctttactgaaatccaactgacacaacccatcattcacactgacactcttcagcagcgtatcctgggatacaacaggtttgtatttatctgacggatagccctgcattaaagttctaacgaccacttctgccatagattccgtctccggatagtgaattgtctggtagattctcaccagaccactgccgtcttttgctgcaaaatacaaacaaaatctggcctccttcacatgcccctgactgccgcttacctccgaaacataatccgagttcttcatacgcagtgtattgccattcgaatctgtcagccagctgccgtcaacattgaaagaaacataatcaataataccgccaaactgcgtcatcgtcttgacaattgctgtccgtacaagcatctccgatgttctggacaactgttcatattcctgtgaaaaatagagtgtcaatgttcggctgtccttgtcgtattgatattgctgcactttgacagatgaagcaataaccgctttataattcttatcatccggtgacacggcaagcgcttccatacactcactgataatcccgtcctccgttgttgaactgagctgataagcaaatgctttgatctttgtctcatcattgttaatataataaatattgtaacctgttcctgtatccgcatcatctttctcactctgacttaccgaaagatgtcggatattctgacacccgccgctgacaagaatcattatcatcagcaggagtgccgccatacagcgccaacttcttctcatcttatctctccttactgcttgatatacgtcaacggtattctcactgaaaatgtcgtgccttcatcctctttgctggctaccttgatcgcaccgtggtgcatctggataatattcttcgtgattgacaatccgagtcccgttcccccggtctctctggaacgcgccttatccactctgtaaaagcgttcaaaaatcttgtcctggtattcctccggtataccgatgcccgaatcatcaaccgtaacatagaaaaacttatgatcagcatccagcgtcacctgtacccagccgcctgccacattatatttaatagcattctcaacaagattggataatgccagtgtcagcttaacctcgtcacattccgccgttaccggcctgtagctttcaagcaccagttcaatatttcgcttggatgcaatcggtttcagccgtttcaaaatagactcaagcagatcattgatcgccacggatgcaatattcagatccgcctctgtcttgtccatcttcactaatgacagcaagtcattaataatgatgttctcacgatcaatctcttctccgatatcctgcataaattcgcggtacaattctaccggtgcatccgtctgcatgttcagagaatccgccagcaccttcattgaagtcaatggcgtcttcaattcatgtgacacattggaaacaaattcctgtctggaactctcaagttcctgcagtcgatgcagcatcgtattaaaggcttctgaaatctgttccacttccgaaaagcccgtcagattcacttcctcatcaaagaaaccatccgaaatcctgttgatggagttcgccatatctttgaacggttttgtaaagcttctggccataaccagagacatgaaaacaagtaccagtccaatgccgatgaccacaaatgtgattgcctgggtaatggtgtcataagtgtccgtcaaatccttacaggacatataaaagaggatcattccccggatctcgctcttatcatcctcattgtcatctctgatcacataggtcagccagatttcatccgatgccttgtcataataagactgctcattgttctggagcgcctgtacaacggcttcagacaccagtttcttgcccgacagcataccgtaagtatccatcctcacatcaaaatctgcatttgtcacaataatacggccgtcataaagaccggaaaactgccgaatctctccatcaatcacatctgaatcgccaccttccagataatcggtctgcagcatctcttctgcaatctgagcaccgtaattgcgaacaagatccacacgattggcccggatgtgattcatcatataattaatataaaaactctgtaaaaatataatcggaatgatcgccagtgcgatcatcgcaaacaggagcttaacatgcatgctcctgaaaactgttctgaactttttcttacttctggaagaaataaccaacaccccattttgtatgtatatatttaggctcgctcgggctggcctcaatcttctctctcaaacgtctgacatgaacatcgacggttctgacatctcccggataatcatacccccacaccagattcaaaagattctctctgttgaaaactttgttcggattcgtgatcagaagttccagcagatcaaattccttggccgtcagattcacttcccgatcgccaataaagactcttctgctgtccaggtcaatgcgcatctctccggaaacaatggtacgctctgcaggctgttcctgctttcttccctttgtacgacggatgatcgccttgatacgtgccttgatctccagaatattaaaaggttttgtcacataatcatccgcgccgtattccaatcccagaatcttgtccatatcatcgcctttggctgtcagcatgataatcggcacatccgatttctccctgatcatctggcaaacttcaaatccgttcaattccggaagcatcacatccagcagaataatgtcataatcattctgcatggccaattcataagcctccttgccgtcataagcggccgttacttccattccatcttgctcaagactgaatttgatacccttgacaatcagtttctcatcatccacaaccaaaaccttattcgtcatatcttacacctcaatttacacaaatcagcgactgaacctgtccgaaaacaccctctttaattcccgggacctttctcagatcttctatagaagaaaaattgccgttgttttcacgataggcaacaatggcatttgccttcgcctgaccgattcccggcagtgtctgaagctgctctgcagtcgctgtattaatattcacaagtccattggacacttcatcttctgtatactctggatcagctgctgtctctccttccgccggcacataaatgcgctggccgtctgtcagctgatctgccagattcaattgctgcagatcagcatcatccgctgcaccgccggccgcttcaatcgcctcataaagccgcgtacccgccgccaatgaataaacatccggctgtctgacatgaccgcagatataaacatatatcatctccggttctgcacatgcactttctgtctcagccttatctgtattctcctccggcgtcatgtccaggcactctgtctccgatgccgtctcctctgctgtctgccactgaatatccgacgtccttttcccatcatagagaaaaagactccccgccgctgcaataaataaaatcgtcagcagcattttaaggttcttcagtctttccatatctctccttccccggagagaacagatatacaaaagtcacacatttaattttacaaaataacctgtgcgattacaagcattttgcaaatttatttcggttttattttcaaatcagcgaccgacatctccacagctttatttccatttcacgatcatgatgccaatgatagacagccccagtcccaggacttttgaccactgaaaatttgctttatccactccaaaaagaccaaagagttcaatcagatacgccgccgctatctgtgaaaccacaatgagctgcgccgctcttgccggccccagctgatccatactgacaatcactgtcaaggtgataaacgcgccgattacaccgccaagaagcatatacttcgggctgacatccatcaatgccgtcacactgcttctgtccctgatgagccaggctgtaatacagacaatcaacgctgacagctgtacccatcctgtactgacccacaaacttgtctgtttcgtcacttcggtattcaaaacaccctgaatactcattaataccccggatatcagtgccacaatccatccaaccataccaacaaccgccttttctgattattcaatctgccgatgcgggcgtttgctcacacctgttgatatagtatagaacattcaagccattttatgcatgtttgaaatcaccgcggtcaacaacaagatgataacccaccgatgccatacgattctccatacaacctctgcattccgctgcctcatccccagtgcagatcttgttgtcatacagttcatactgtttacggttcgccaccggcgaaagattcggcatcactacattgcatcccgccagcattccctgttcacgtcctgtagcttttatagtgcccaaagccgttgttgcaggcagaagtacattcggaaacatgactctgagaacagaaagaagataaatcgtcagatcatagctgcctttctcttcatgggcaaacggcgtttcatgatgcggcagaaacggtccgataccgatcatctccggctgcagatcatgcaggaaaatcaaatcttctgccaggcattcaaatgtctgccccggcgcccccaccataaaacctgcgcctacctgatagcccagctccttgagtgtataaagacattccttgcgattggccagggacatttcttccggatgcaattttcggtaatgtgcctcattggctgtctcatgacgaagcagatatctgtctgccccggcttcttttaatcgctgataactttcccgtgaacgctcaccgacggacaaggtaatggcgcaatccggatagtctgttctgatgctgtggacaatatcttccattctgtcatcattaaaccacggatcctcgccaccctgaaggacaaaggttctgtaccccaggcgataaccgctctcacaacaggataaaatctcctccttcgtcagcctgtatcgctcaaggtatcgattgtcccttctgatgccgcaataataacaattattcctgcagtaatttgtaaactcgatcaatccacggatataaacatcatgtccgtaatacttctcccgaaggcgtaccgcctcttttcgaagtatttctctatcctctgcatctgtattcgccaacaattcgacaaactcctctttcgacaaaattctattccggattaacttttcaactaacttcatatctaaaaccccattttaaatcaaaatttgcttttcctacaagtataccatgaaaaatacgaaataaccagacgagggacatgtatacatgaaggatatgaacacgcaatcgttccttgaagtttttcaaaatccaagaaactatcagattgctgccctgtcatattgactatttaataaaccggcgtatactgaattttgtagaaataaacagggaggatttacaatgtcacttttaacatctgctgtctccatgacaaaggcaatggttcagatcgatagtaccgatccaggtacttatgaaaaagccatggccgactggattgagcagcaattatctgatttatctaatgttttaattacccgggagaatgttttgccgggacgtccgaatctgatggcggaaattcccgggcccaagcatcttccggccctggttatgatctgccatatggataccgttgtcatcggagacggatggacgttgccgccttttgaagccattgaaaaggacgggaaaatctatggccggggcgcctgcgatatgaaatccggtctggcctgctgcctgtccgcttttatcatggcagccagaacactccatgcctccggtcaggctccaaaaaggacactcaaactcatctgttctatggatgaggaagactttatgcgcggttctgaagcctgcatagggtccggctgggtcacttccaaagactgggtcatcgatgcagagccgacaaacggacagatccagatggcgcacaaaggccgtacatggtacgaaattgatgtggagggtcatactgcccacgccagcaccccatggaaaggggctgacgccatcgctgccatggctgaaattatcagcgcacttcgccaggacattcttaatgccccttcccatccagatatgggcatttcaaccgtcacgttcggtcagatcaccggtggttatcgtccttatgttgtaccggaccaatgtaagctgtggatcgatatgcgtcttgtaccgcctctgaacacagcaaaaacaaccgaatttgtacaaaacgccatccatctggctgaggaaaaagtcccgggtgtcaaagccacttacactatcaccggtgaccgtccgcccatcgaaatgaacccggattctccgcttctgacagaattaaaaaaagcctgccatcatgtgacaggccatcaaccggaagtcagctgcttcaccggctatacagataccgcagtaattgcaggacagcttgataatcaaaactgtatgtcctacggtcccggctgccttgaagctgcccatcagccggacgaatgggtagtgattgatgatattatccgctgtgagaaggtctatcatcagcttatttcttctaatatactgtaaaatattgtagagtaggttagagggctttgccctctttcccctcatcaaaccgtgcatgatgttttatccaactgactcgctatcgctattttgcaaaccaggctgtcaactgatgtttctcatcaaaagtcacgagactgccctcatccaaatgacggtcataaagcatccggtccgatgctcttacaatctgtcgttcgccattctcatcttccagccagacgctatccatggcttcttcgccatccggtctgccctcgcagccataatctgcttcatcaattcgaacaattttataacgcttcatttctgtcacctcttaatgttttttacacattattcatctcttatgtgtctgccctcctggcttcttctctctactttttttgtaaaccaaaatacagacttcattccttcttattttgcattcttatgaaatctgctgatgcagatatttctcttttgtagccagtcctccccttatgtgccgttctgccttattgacatccagcacttttctggtttctgatgccagagacggattaatctcttccagcctctctgtaatatccttatgtacggttgactttgaaataccaaaacacctggccgtctgtcgtaccgttgactttgtttcaattatgtaataagccagttccactgcccgctcctcgatataatctttcacgaaaatcctccgaagaagctgtttttacagtgtatgtctatttgcaggacaaaagaccagcgattagaagctcaatatattttaatccaaaagtttttgacacttttaaaatctattccttcaactccaactcaaccggacaatgatccgaaccgaatatctcctgatgaatggaagcagatatcagtcgttcttttaaagcatctgatacgataaaatagtcaattcgccatccggcattattttttcgtgcgttaaatcgataagaccaccaggaatactcccctgtcttatcaggataaaaataacgaaacgtatcaataaaacctgctgccaacagttctgtcatctttgcacgttcttcatctgaaaagccggcatttttacggttcgttttcggatttttaagatcaatttcttcatgtgcaacattcaaatctccacacatcacaacaggcttcgtctgctctaacgttttaagataatttctaaaatcatcttcccatttcatacgatacggtaatctggcaagcccgtccttagaattcggtgtatacacattcaccagataaaacgaatcgtattccaacgtaattacccggccttctgtatcatgctccgcaatatccattccatatctcacacttaacggcttgattcttgtaaaaacagctgttcctgaatagccttttctctctgcatagttccaatattgttcataccccggaaaatccagctcaatctgtcctgcctgaagctttgtctcctgcaagcagaaaatatctgcatccagttcattaaaaatatctacaaatcctttaccaacaacagcccgaaggccattcacattccaggaaattaatttcactttgtcatcctcctgcttgatctttccagtatccaccttaaagtcactttttctgtcattaacatttacattatagcaaaaagaaaagctgcatgccacagcttttctttttaaagattgcttacttgaaatctatttcaatattatcttccccaactaaatcatctaaaaatacatgaattagtctttcaacattttcatctgccctctcaaacaacatttctttgtcaactgtcgggttttccataacatctttctccgcctttgcaattgcttcagcgacatcatccttattattccaattcaaaacagcctttttttcatcaataaatttaattgaatttggatctatgtgtgctgtatctaaaaaatcggcatgtggaagagaaataatgtatttatcaccctttttatcaatttttaaattttctatctctactcctgcttttaaagttgcattatactccattgtaaatcctttttgggtaataaaaggaatacttcctttttctatttgaactctagatgtatacgtcacttcttgcgttgcaaattccccaatattctctaattttccagtaagataatctaacgttacttcttttttattcatcacgttgtcaacttttttataaattaatattcctatcaaaacaccaatcaatattccgacaatcatagaaattccaatcatttttaacttttttattttcttttctgtactcataacatcttaccctttcctcttacgtaataagtctatttattatttatcttctgtttcttcacattcgaaattgctgtcatctatgtccacgaccgtttcttcattctcagtaacatctgcaaaatcccccatcataaaccattgatacgcacgatctgctataatcttggtttccaccaaatccaggcctccacctacaatagctcctacacctggcaccattttgccaagattaacaatcccctttgtaccaaatttggtaacaaatctgaatccaactttctgattaatttttgtcagtactttgcctggtatcttttttataacaccatttgcaaatttgacaccaaattggatccctgcctgtttcaaaatgttattgacagtaacacctgcaagacatgcataaacaaaagtttgcgtttgatcactgtttaaatcgtaagatgccatataggccgtacaggcgatcattcgcatttgaacatataggacgctgccaacattagccggaattgaaaccggcaaggtaataatccctccaaatcctgtaactactcctgatgtcgtacactttgtgatctgatttttcagcattgctttacatgctttttcttttgacccatacttcgtcagataatcttgcgccatgctttcaacgctctgactcaccatcggtactccgtttaaacatttttcatagcaagaatccaacaatttcataatatcttcttgattaatgcttgactttaccataatattttccctctctgatgcctccaatacacgacatttttttactttaaattctatcacacttgatgtaaaaagtcatttttttcatacgttgataatattttctcttttcttttataatttgaaaggatcacattttcgtgatacaatatgtaaaaaatgaaggggatatggcaatcaggtataaaaacttttatccttaataattgtacgggatatttccaacggacaacttatgcgtgagactaacatatctgcaaatataatgatgaaaataaaaaaggacgataattgcatgagccaatatactgaattttacgatagagaagccgaaaccttatctttagatgatgatagatttgaagaaagacttctcgaaattgcttcccattttcgtggatttgatgaagcattgacagcctttatcgagacacacggatacacaggagattcaactgatgtgcttgcaaaagcacaatttcttcaaaaaaaattcaagtcagctaacataaaactaccccgcgatttcaaggagtggtttgttccgaataagaaggtctctcgcaagacggcatttcaaatctgttttgcacttggattggatgttgacgagaccaacgattttttcagatgtgttcagtttgagcgaagctttgattgccataccataagcgaggctgtttattatttttgtatgaagaacggtctttcatatactgaggcacaagagattattgaccatatccctgtgccccaaaaagtaaaaaccattcccaactgcgagatcctttataccagaaccatcatcgaatacataaacggcattgacgataaagaaaggctgatacagtacatcatagataatatcaacgatttccaatacaacaacgttactgctatcaaatacattcaagagctttggtctgagatttccaagacagacggattggctgcacaagaaggcacgattatagatagaacctataatcgatttgaggacagacatagaaaaggtatgacagacactcgtgctacagaaattattgccgaagaaatctgccaacaggagcaagaggtcaagccatacgattatgtagttgccggttcggatgcctcaacctggattatcttctctcagataatcggtctggcaaactaccaagaaagcgagtattccatcaagcatgaccgttctctatcttcggttttatcagaaaacaagctcatgccgttaaaggcggattactgttttccgagcagacaaaacattgacaaactcattcgcgggaatttagtcggtgatgatgaaatcattcggaagatgctgatttttcttgttttctatagtcattgggcaaagcttatcatcaaccaaaacgatgctttctattcggcaaagttctctgatgctgaaagatgtctatacacgataaataaacgccttttggatgcaggatatccagaactgtatgccggcaatccttatgattggctctttaagtgggcattgaacgacgagaatccgctgatcgctttcagacactatatgggcgaggtttttgctgtaaagggagaaaataccgaggattgattttgcataggcaaaaccaaagtctgaaaaccatgtgctataatcaagtcacaacaatgaacaggagatgaacttatggaccatagaattgctttgaaatcgaatactccacttcgcttatgcaacagtagaggcgaagcaattcattgtatcatcgaaagtgaaatcggtcgtggtggctcttgcattgtgtatgaagcagctcgtataactgataccggcgataaaacgctgtacagagtaaaggagttttatccttataagctcaatatttctcgtgacgaaaacaactgtctgatcccatcggctaatgatgcttctgtctttgctcaaagacaggagcagttccattctgacttctcacgcacaaatcaattattttattctgataccaattattcctcgatggcaaatcagcttgatattttcagacagaacggtacatcctatgttttgtcagcttattcttccaaggaaacactggcaacatataaaccagaaaatctaaaagaatgtatcacactcgttaagcaagtggcttatgtcctggacaacattcataagctgggatatctctacttggataccaagcccgacaatgtgcttgttgttgacggataccaaaaacaaattcagctctttgacttcgattcgcttctttccattcaagaagtcagaaaaataagtaaactgagctgtagcaatattcggctctcttattctaagggattttctcccattgaactgcaaacctcaaaaatcaaacacctgggtgctcacacggatgtttacagcgttggagcattactgttctatctcttgttcggctacacacctactgcacccgattgcgaaacggatactgtgtttgatttcaccaaaatccaatatgactatcacaagtgtgatgatagacttttcggctccttatctgagttctttcataatgctttggctatttattacgcagacagataccaaagtatgccggaagtctcggagcaattgcggaaaatcgaaaagtatgccgattttgtgataccgagaatctattccactcaaattgaaaagcctaagattttctatggacgtgagcgtgagtttgaagaattggacagtctcttggcaaatcccgattataattgcctgtttgtcaccggtatgggcggtatcggtaaaagtacgtttatcagagaatatctgacatgccgccgagaaaaatttgatacggttttgtatgtccattacaaaggcagtattgaggcaactatatccaatgacagcaacattgaaataaatacattaagacaggacgaagaacccgggatcggcacaagatactttaacaagaagctccagaagattcgtgaacttgtaagaggaacttcatccgttttagtaattgacaactttaccggcgagttcgatgatgatctgagggaacttctcaaaacagagctaaaggtcattcttttgagccgtaaaactcccttttatcagagctgtcaagaactgaggctctctgcagtttcggattcgaacgcacttcgctgtatctttgaagacaaccttgggcgttctattgaggagaatgagcgagacagttttatgcagattttgaagcatgtcatgggacacactcttgttcttgaactgattgccaaacaaattgccaatagtcacatcactatttcaaatgctgcctctttaatagatgagcacggtttctttgctattgcaccagaaaaggttgtttacgaaaaagatagcaagcagaccagtgatacaatcggaaacatcatagacgctctctttgaggcgaatatgctttctgcagaaaagaaagtcttgatgaaggtctcctctctgctcggtgacgacggaatagatatcaattattttcagcagattatgcaactcgtgtccaaggatgatttgaatgaacttattaaagacggttggctaacgatttctggcgatacgatttctatgcataatgtaattcaggaatctgtacatcgttgggaatggaaaccagaatatgtcaatgctgcagagcagttcttgacatacttctatgtagaaatccgtctggaatccacaaaaaacaactatccgaagaaactgcgaaaatatataactgccgtcgatgcagaacttccaccagagctgaaagacaaatggatattcaagaagttgattgcttatcgtaaccatcgcaagaatgaaatcgacaagcggcttgaaaaaaagtccgataaacagaagcttgtcggtaaggtctatcgggaacggtacgctcgtatcaaagacgaatctcctgcagacatcaaaaaattgacgaaattgcttttccaggcagaaaacattcttaagcaatgccagagagaagccgcactttgtgatacagacctatttctaaacttacaattgaccgtactgctcaatatgccacgatatagagaagattttattttctcagaaaaaaatcgactttttgctaataacgctaagattctagactttggtgagtatgcaaactccatgcgtaatatcagccaagatgcggtcagtcttatgctgatctataaactggtattttcaatttatgctgcccacggtaataaagaagctatgaaggactggcttgaaagtgcaaacaaagcagcaaggcatttccgaaaacaagaggtttatgccatttactataatatggtttccgattattatgatattcttcttgatggttcttacgatacagaagaccccaatgaagaacgcttgctaaataaaatgcttgatgctattgagaaaacacttcattactcaaagagaggtctttctcacgatgtcaatcacctatacgcaaaaaatattctggctaaggctacaattttaatgcgaagtggccgaggtacagaaaaagaaatcagcaccctcatcaacacagcaaagaaaataatcacagaaaacacttcgcaatatgccgatgttcgtctgcaatactatttggtttgtgcctggtatttcgctttggtacatgatagtgcgatgtccacggatgtgttcgttaagaatgcacgagaactgtcggacatcatcattccaacagatttgcagaaaattgaggaagtcatcattccgtgtgcaaatattttctttgagttgagctgtcatgacaaagctatggctctactctatgaaggaacacgcctctgtgccaaacacgcaaatacagattcatacgctcacataagacaagagctatgcaaccatctttttgaggttggaattgaggcacatcaatttaatttgtgccaaaaggcaatcgaactcatagaggctgagaacaaagaaatcgttgatcctaaaaacagggttgtcattcccgccgaagttcgtagtatcatatcaagcaaaacaacttaatacttctcaaaacaaaagagtttggactatctaggctcttttgttttgcattagcaaaaccagatatgaaaaagcgtgtgctaaactttaatcagttcaaaagaagaaaggagaactaaaatgaatactaacagaataagccagattatcgaaagtcttaacggtcttgggacaaaacagaaagttcatagtggcaaattggacgtctgtaaattttaatacgaacggaggtagaaaaaatggcaaaatttaaggtgttattttacggtgagtatgaggatgaagtttttaatacgaaagaagatgcagaagaatatgctctgtacctatgctcatgcgcccgtgaaggtgcggaaattctacatatgtctaatcccggcgattatgactatgacgaagataattttgaagatccagactacgaaatcgtaaaaattgattaggaataacaaacagatttagaaggttcagattatgaatatgaataagaaagtaaaaatatttatcattttagctgttatccttagcatggtagtatgctttgctggatgcggtaatatcgaaacacccaataacctcaacagtaataccaccaaggaaaagattaacatagaggatatttcttggaatgttaatgaaggtatcgttgacggtgaccattatgttcttcttaactacacgaacaatacacaatatacaataacaaactttaaacttaccttcacagaaaagacaggtatcaccgaagaagaaaaagtaaaattctattcagatattcaagaaaagtttgaagcaagcgataaagatatggaaagtatcaagagtcaaccaatttcaatgcacgccgaaacgggcagagttgttaatccaagcgaaactgcttcaaatataaactgttattattatagcggctccttttatctgaaagacattaactactataacttggttgagcctgatattgctaccattaagtatattgatgaggataagatttttaccgtgtattatgattacggttcaaaaaagtattcagccgaatcagaaacagaggtagcataccaatggtcgcaaacagaccttggaagcaaaattccgaagccggatgtcaaagtagtagaaagcgacagagatgacgaaattatctttatgtttaatgcatacggcttgtcattggatcaatttaatgcttatgtcgaggaatgcaaagtgcttggatatacggttgatccgggcaactttgaaggattctattcagccgataacacagaaggctataatgtctatttatattacaataaaaaagacgattcaatgaatggcgctatccgtgctcccgaaaccaaaagcgaatagtctaaaacaaataaatatataatatcggggcgatgattatttcgcatcatcgtcccagttaatgtaagaagtctttttgcgagcttctttttctgctgtttctttatccttcgtgtcagatcacagaccgcccaggcaatactcatacccgccgcaataccaaaagcgaagagaaacgtatccttcccgtattgccatgccatttcaagctcattctctacaatgctgctcatgcaataataaagcgtgcttccaggaatcatcgggataacagatggaacaaaaaaggcagttgacgtctctttacagactcttgccagaatttccgcataaaagtcaacaaaaagccctgccagcaatgaactgaagaaaatccccaatccagcatctttggatataacatatacaaaccaaccaaatgcgccgccaattcctaccagcggcagatagttcctttttgtatgaaataaaatgccaaaaccaatagcaccggttgcgccggtcaataattgaatcaccatcttatcattctcccgaaaaatttcttcatcttttttatatcgtctaatctgccatcatttctcattttcaaaataatctgaataaacaaatcgacgcaataatgccaagtgccaacactgctgccaaaagcacagcctcaataaatcgcataaatccagaaatcgtatcgccgatcaatatgtctcggatcgcattggttgccatcaagccgggcacaagcagcatgatatcaccaatcatcatccgactcatagacaataccggacagattcttgacaatgcacagatgacgcagcccatcaggaaagaagccacaaactgaaaagtgacctgattcatacaataaggcatcacatactgttgtaaaagccacaaccagacggctgcaaccgcagcccctgctccatccgccagactgccgccataaaaaattgcaaagctgacaccggcaatcacatttcctgccaactgctgccatttcaatgacggcgtctgacaaaccttccgaatcctcatttccagttcctgtgccgaaaatggctgcttacaaaattcacggctgatgtcattgagctgaccaagacggacaaaatcgttgccaccggcactacgaattcgtttggtacgtgtcagcacacccccgtccggaaattccatcgtaataacaatactggaagtaatgacaaacacattcatatccactgcgccacaagctctgcccatcctgttgagcgtatcttccacacgaaagatttctgcaccgcttaataatagcgcctcacccatttctataaatatcttcaaaaatgctttatctgaatacatgtgtctgtcacctccaatgccattcacttttgattgtatacaattctattttttgtcaatcacttcttgcatgtgtcgttataaattgcgtctgaatcgcccaataactaaatttttctaccgctttttctaaaaatatgttaaactatatcggtaatttttatagaaaagaggtttttatatgcccataggtattatcatcaatgcatcctgcatcgctgtgggtggtatcattggtctgtttgcccagaacttgatcagcaaacgttttaaagacagtttgaatatgatttttggcctctgctccatgggaatgggtatcagctcaattgtccttatggaaaatatgcctgcggttatttttgcacttatcctcggaaccggcatcggtctggccattcatttaggggataaaatccgtgcaggcgccctgatgatggaaaaagcgtcttccagaattgtcaaaagcagtccttctgctcttgatagaaaggaatttacggaaacactgattaccatcatcgtcatttttgttgccagcggtacaggcatctatggctctattgtctctggcatgaccggtgatcacagcattatgattgcaaaatctatccttgatttattcacagccattatcttctcctgtacccttggcagtgttgtttcattgatcgcgattccgcagtttatcctgtttatgacattatttcttctggccggtgtcatctatcctctgacaacccctgcgatgatcaatgatttcaaagctgtgggtggatttttcatgctggcagccggtttccgtatgaacaaagtaacaaactttccaacagcggatatgattcctgctatgatcctgatcatgcctttcagctggatctggagcagctttatccttccgttggtgtcttaagtcaacaaaaacccacagaatacgactgttcaggtgccccagaatttgatacaataaatccatatggaactttacatgcaatttcatataagttcatcaatgaatggattcgagggatataatgatttattttatcgtgaatattacagccagaaccggcaaaagccgtgccatctggatggaaatgaaagaaatattagaaaatcgaagcatagaatacaaggcttttcagaccagatacgccggtcatgccaccgatctggcacggaagatttcttctcttcccgaggacaggatttatctgatcaccgtgggcggtgacggcactttaaacgaagtgattaacggaatcaccgatttttcacgcattgtactgggtattcttcctattggttccggcaatgattttgccagaggcatgggtatttccaaagacacgctgtccaatctggaacaaatgctggatttgattgaatcagcctcagaaggcactgccattgacctgggtgaagtctcctgcgaagcattggatacaccgaaatattttgccatcagctccggtgccggcctggatgctattgtctgcaagaaagcgctgcattccaggcttaagaagtttctgaaccaacttcatctcgggaagctgacctatcttctgctgacaattgagtctttgttctccatgaccacctgcgatgccgacattatttttaatcatggtgaagcaatgcatgtcagccatatgatcttttccgccggtatgaatctgcgggtcgaaggcggcggtgtacctatggcaccggatgctgtccctgatgatgggatgctgtgccttgccatggcccacgatgtacccaaatggctgacatttttcctgctgccatttctcgttgcaggcaagcagaaatatatcagcgtctttgactgcattccatttaaagaatgcacgctgcatctttccagtcccctgaccgttcatgcggatggtgaatactgcggtgaaaatacaaccattacatacaaatgcctcccgggaaaactgcattttctgaaaatatcgtagctgctgaatttcacagccaccaaacattttcaaaatttacagtgtcccgagaggcacttttctttttataaatgctgcatcagcaatggcacatctctcatctggcagatgcgccaacacagaatttctatatcagtccctgaattaagataatcaggatcaggatcggcagcaatgtcataaaataccacttcaatttgcccgacattttcatgccttttccccgattcacttcttcaagatagttgtcaaatccccatccgcgtctgctcacacagaacaataagtagaccagtgaaccacccggcagcaaaatattgctgacaagaaaatcctctgtatccaaaacatctcttcccccgatcaaatgcaggtcgctccagatattatagccgaatacacaaggcagactggcgatcagaataagaattccattaaaaagaacggcctttttacggctccagccaaagttgtcaatgcatcctgcgatcaggttctcaaatacagcgatgaccgtcgaaaagctggcaaaggtcataaacaggaaaaataatgttccccacagacggccgcccgccatattcacaaagacattcggcaatgtcacaaagatcagtgacggacctgcatccggttgaatcccaaatgagaaacatgccgggaaaataatcagacctgacatcaatgcaacaaaggtatcaagtccgcaaattctcacagattctccggtgagggttctgccgtttggcatataactgccgaaaatctccatggcaccgataccaagactcagggtgaagaaagcctgattcatggcttctgtgatcactttgccgattcctacatccgctgcacgcttaaaatccggcaaaagataaaaacgcaaaccttcgccggaacccggaagcaccaggctgtgtactgccagcacaatgatcagtacaaggagggctgacatcatgatcttggaaattctctcaagaccattctgcaaaccaaaactgcaaacaataaatcctgcaacgactgtaatcgccatgaatactgccatttcaacaggatttgccaacaggtttgaaaaggcaccgcctacagcatcggcatccattccgcttttgaaactgccggttatgaatttgacaaagtaactcagcatccatcctgaaacggttgtataatacatcatcaacagcacgcagccgatcatacaaaaccaaccgtgaatatgccatttctggccatctttctccagtgctttataggcctggactgcactcttcttacctgcacgtcctactgccaattccatcgtcaaaaccggcacacccatgcaaagcagaaatatcaggtaaaacaagacgaaaacaccaccgccgttttgtcctgccacatatgggaagcgccacacattgccaataccgatggcacagcccgcgcttaccagaataaatcccaatcgggactgaaaattttctctattcatacttctattttccctaaataaacagcataagagctgcctctgaatcgtaatatggttattcatcagggcagctcctgcctctttctctctaactactcttattcttcaatctgagccagtgcctgcgcaaggtctgcgatgaggtcttctttatcctcaagaccgcatgaaatacgcacaaggcctgccggtacacctgctgccgctaactgctcatcactcatctgacgatgcgtggatgttgcaggattcagacagcatgttctggcatcagccacatgtgtctcaatagctgccagtttcagatgcttcataaatgtctctgctgctttacggccgccctttaactcaaatgaaacaacaccacagccgccctttggcatatacttcatagcacgttcgtggtatttatcactctcaagacccggataattcacataagccacctgcggctgcttctcaaggaattcggccacagcctgaccattctccacatgacgcggcatacgcacatgcagggattccaaaccgagattcaggataaatgcatgctgcggagactggatgcatccaagatctctcatgagctgtgctgtacactttgtgataaaagcgccctctttgccgaacttctcagcataggtgatgccatgataagaatcatccggtgtacaaagtcccgggaacttctcagcattggccatccagtcaaaattaccgctgtcaacaatagcaccgcccacagctgcaccatggccgtccatgtacttcgtcgtagaatgtgttacaatatctgcgccccattcaatcggacggcagttgaccggtgtcggaaatgtattgtccacgatcagcggcacatgatgggcatgggctgccttcgcaaacttctcaatatcaagaacagtcagtgccgggttggcgatggtttcgccgaaaacagcctttgtattctctttgaatgccgcattcagctcttcttctgtgcaatccggagaaacaaatgttgcttcaatgcccatcttcgccattgtcacagaaatcagattgaatgtaccgccgtaaatggatgaagatgatacgatatgatcacccgcctgacagatattgaacagggcaaagaagttggctgcctgtcctgaagatgtcagcattgctgctgtaccgccttccatgtctgcaatcttggctgcaacataatcattggtcggattctgaagccttgtgtaaaaataaccggatgcctccaaatcaaataacttacccatgtcttcacttgtatcgtacttgaaagtggtggactgtacaatcgggatctgtctcggttcaccattgccaggtctgtagcctgactgaacacattttgtattcattttgtaatcactcatacttatacctacctttttctaacaaaacatcccttttattgtatcacttccaatagcagactacaatgaaaaccattataaatcataaagtttgttatatttttctgtcagataatccgtataaactgtcggatcaaaatcaccgcaggcattcttcacgatttcacccggagtcagcaggcttccatactgatggaccttctctttcagccatgcagatacccctgtcagtttacctgcacgtacttcatcccatacagggaaatccttttccatattgcaaagcatctgcgcaccataggcacttccgagggcataggatggaaaatacccgaaagaaccgccagaccaatgggaatcctgcagacatcctctcctgtcatccggcacatccacaccaagatattctttataaagacgattccaaacctctggaatatccttcacttcaagactgccatcaataagctgcttctcaatctcgtaacgcaccatcacatgcaaagaataggtaagctcatcagcctctgttcgaatcaatgatggctgtactttattcaccgcacggtacatctgctctgctgtcacatgctttaactgttctgggaaaaattcctgcattttcgggaatatcgctttcacaaaaggcagtgaccgtccgataatattctcatagaatctggactgactctcatgaacccccatggatacaccgccggtcagacaggtatattgcaggtcatcacggatacctaactcatatttggcatgaccgccctcatgaatcacagaatacatggaatccaccacattatcctctttgtaattggttgtgatacgcacatctttattattaaattccagcgtaaaagggtgctctgtctcgccgatggtacagtgacctctgtccagttccatcacttccatcagatagtcagaaaactttctctgaatatctaccggataatgcagatgcagaaaactatcatcaatctgtggtttctcaccgatagcatgaataagtggtaccagacgctcccggactgtctcaaaaaatgtatccagaaaggccatatccacaccgcgttcatattcatccaacagtgcatcatacggctttttgctgctgtcataataacccgcaaactttcggttataggcaaccagtttctccaataccggagcaaaaagtgtaaaatcactgctctcctttgccctgtgccacacatcactggcttcattcgtcagcatagcataatccatatattcatccgccggaattctggacaaacggtcataacttctcttcaattcttccacctgtctctgctccacaaaagacagattctccttctgatccgccaaaaacgccagtaattctcctgtttccggtgctgtcatcaacttctggctctctcctgccaaaataccaagggccacacctctgccctctgaagtatccttcggtgccactgtcacactatccagatacaaagacgatgatgctgtctgataagcatataacttcttctgaagcaggccaagctgctctaatgcactttttaactccatattctgcagactccttttaatatattttattttagatttctaactgtaaatccttcatattccttcatccatccttgcaaatagttgtttgccttatttcgtaaacttcgagtggctcaggaaattctcactcttgatggttttcagcatagattccgcattcagatcaaaggctttctgcggccatccgcccttcttctccggtctccagaacaccgcttccatggcttttaactgctcttccggtgtctcattatctctaataatctccagaatcctgctcttcgcagcagtcagaccatcttcaaaccactgccacaattccggtgttgcctcacccacttctccgtgatgggtcagccataacttctttgccccgctgtttctgcaactgtcaatactcttcatcgcttcttcacagctgacaaggaactgcggcatataatcatcctccgtattgatgctgccgatggtttcggaagccagaagatcatggccatcgatcagatacgacagacaatcctttgtatgtccaacggtcttaattgactgcacacagacatctcccacattaatcgtttcgccgccgatcagcatctgatccaactgtatcgcacgtgttgaatagtcatctggcagtgccgtgccgtttaactgtgcagcactggctgaaagttcacgaatcagccgcttagccgacaactttgaaaagacgcgcccggcataggctgcaccaaataccatggcatccggccaatacttcttgatcaccggcagggctcctacatggtcataatgggaatgggtcagaaaaactgcatcaatcggtctgtccccgataatctctttaatcttttcaaccgttttctccccataccaggccatacccggatcaaataatacagtattcctctcacccaccgccagatgacaggaacccaatatctcatcatttaaataataaaactgactcatttctagtatccccttttatcaatatttttatcaacaactattccgtcctattgattcatcttttttcttgcatttctacaaatcccagcggatcgccctctgacttcaggaaatacagcagcatatacgcacacatcatggcgacattctcttcttttaaaatacggcgcacctcttttttatctgccagcacaacctgaatatcctctgagctttcctcaaaccggttatccggcacgccggaagcatagccatagaccattccgcaggcttcatccgtcataccgactgttgtaaatctcggcttagtatacatatcatccgccggaatcaccttaagatgcaatcctgtctcctcatgaaactctctcacagcagcatccgtcattgcctctccagtctccacaaggcctgccggaaactcatagacataatcccccagtggataacgatactgtttcaccagcaccacctgatctctttgttcaccgtaaacactgtaaatactcacgccatccgggtcattcctatgcgtcactgccttcagatcatcttccgacttcgcacgagaagccacataatactccgatgcttcgccattacggtgacgcacattcatacaaaacaaattcagaaaacgatggtgggtttcctgaataattttcgttattctatccatataaacctccaaaaaatcaacacaccataatcatagcataaaaagaacggatagtcagccaaatatcacacaaagctactatccattctaaaaccaataaatattttacattttatctgtacgaaaatttttttattctaattcaaacgctcccgtatacaactgataatacttacccttctcagcaatcagtttttcatggttgcctcgctcgatgatccgtccatgctcaagtaccataatcacatcggagttcttgactgttgacagtcgatgggcaataacgaaaactgtacggccgtgcatcagggcatccatacccttctgaacgatggcttctgttctcgtatcgatggaggatgttgcctcatccagaatcataaccggaggatcagcaacggctgctctcgcaatagagatcagctgacgctgtccctgggaaagtccgcttccatcaccctcaagaactgtctgatagccattcggcagcattcggataaagccgtctgcgttggccagctttgccgcagcaatacattcttcatctgtggcatccagcttgccatatcggatattgtccatgaccgtaccagtaaagaggttgacatcctgaagaacgacacccatggaacggcgcagatcgtctttcttaatctttgtaatgttgatgccgtcgtagcggattttgccgtccgcaatatcatagaaacggttgatcaggttcgtgatggttgtcttgccggcaccggtagcaccgacgaaagccaccttctgacccggttctgcatagaggttaatatcatgaagcaccagcttattttcttcataaccaaagtccacatgttccatgacgacatcaccttttaattcctcatacgtcagtgtaccgtcgctgtgaggatgcttccatgcccagagacctgttcgttctttgcattctacaagctcaccattttcacgcttcgcattgacaagggttacataaccatgatcttcttccggttcttcatccagcaattcaaaaattcgtgttgcaccggccaaggccatgatcaccgcattcaactgctgggaaacctgtgcaatcggattgataaagctctttgacatcgtcaggaaggacgcaattgtaccaagtgtcatcgcaccggcacctgtcagactgatgttcgtcacacctgcaatcgcaagacttccgccgactattgccagcaacacataaagaatattgcccatattgcccatgatcggcatcaggatattggcataagtattggccgttgtcatgctgtcacaaagctcctgatttttcttatcaaaaacagccttggcttcttcttcatggcagaataccttgacaaccttctggccattgatcatttcttcaatatagccattgacatcaccgatattctgctgctgtttaataaagtagacactgctctttccggcaatggatttcacaacttttaatatgaggaaaagaaaaacaacgataaacaatgtcatccatacactcagatacaacattgagacaaacacggcaacaattgtaacacaggaagacaacagctgcggcaaactctgagaaagcatctgacgcagggcatctgtatcattggtataatgactcatgacatcgccatgtgtatgcgtatcaaaatatttaatcggcaatgtctgcatatgtgcaaacatatcatctcggatcttctttaaaataccctgggaaataacggccattgttctgttatagatcagactggccagaataccgatcacataaatgcatgccatctgtacaatggctcggaataacgcatcaaatacaggattggcttcgagaagaagcggggaaatgtaatcatcaatcaatctctgaataaacagggaagacatgacattggcgatcgcactgagcaaaatgcagataacaaccactatgacacgtgttttataaacactcagatagcccagaagccgctttaatgtactcgggttcacctgtggtcttgacggtttcttattcattgtcatctcctcctttcttctgtgattcatatacttcgcgataaatatcagaggactgcatcaattcttcatgacgaccgattgctttgatctcgccctcatccagaacaataatctgatctgcatcctcaacagaagcgacacgctgtgcaataataatctttgtcgtatccggaatctcctctgcaaacgctttgcggatcgccgcatccgttttcgtatcaaccgcacttgtagagtcatcaagaatcaggatcttcggcttcttcaaaagtgctcttgcaatacaaagtcgctgtttctgaccaccggatacattcgtaccaccctgctcaatatacgtatcatagccatccggaaaagtctgcacaaattcatctgcacaggccagacggcagacacgctgaatatcctcatctgtggcatttttgtcaccccagcgaagattttccttgatcgttcctgaaaaaagaacatttttctgaagaaccatcgctacttcattacgaaggctttcaatatcataatcccggacatcgacatcgccgacaaggacgcggccctctgtgacatcgtacagtcgcggaatcagctgaacaagacttgattttgatgatcccgtgccaccgatcacaccaatcgtctgaccggagcgaatatttaaattcacatgatttaataccggcttatctgccttcttattattaagaaaaaacgacattgtcaaactgaatatccccgtttttcacttcataaaccggatgctcaggattcttaagtgtactctcttctgaaaggacctcacagatacgctcagcagatgctcttgccatgatgatcatgacaaataccatcgacagcatcatcagactcatcagaatctgcatcgtataagtgaaaagactcataaactcaccggtagagagtccaagtgcttcatcaccgccgcaggccacaatcgctctggcacccaaccagcagatcagcaacatacatgtataaacagccaactgcatcaacggcatattaaaggccagaatctgctccgcctttacaaaattcctgtaaatattatcggaaacctgatcaaactttccgacctcatgatcttcacgggtaaaggatttcacgacgcgaataccatacagattctcctgaacaatcgcattcagacggtcatacgtcttaaacaccctctcaaaaatcggatgcactttcatgataatcgcataaaggccaataccgagaatcggcacagtgatcacataaattaatgacaaatgcgcatcaattttgaaagccgcaaacagtgcacagacaagcatgatcgggcttctgactgcaattcggataatcatctggaaggccatctgaatattggtaatatctgtcgtcatacgtgtaacaagactggcaatcgaaaacttatcgatattggcaaaggaaaactcctgtaccttataatagatatcctgacgcaggttctttgcaaaaccagatgaagcctgtgccgcaaactttcctgaaatggcaccgcagaacaatgaaatcatcgccacagcaagcaaaatcaatccatacttccatataacgcccatatctccctgatcgataccttcatcgatcagttttgccatgatcagtggaatcataatctcaaaaaagacttccaacgccactgtcacaggagacatgatcgtctgtttcttgtattgccggatacttccggccagcgttttaatcatacaaataatcctcctatctctatctagctagccgcatctgtcaaataaggacggcttattcttctaacatgttatctgcaactctcttcaataaatgcatcagggtatgaaactcttcatccgacagcccgtccctgatcctgttttcaagctctattctctccaccgctgcattggcattgatctctcgtccttcctcagtcagaacaagccgcttcaatctggcatcactggagacactttccctcctaagcagtcctttgctctccatgccctttaacactttggaaaccgttgacctggtcacacaaaatttttcttctatatccttctgataaatctcttcattctcatggtctgccaggtatccgagaatccagccattggatcctgtaatcttatgaaccttactcatatagacattactatcggcctttctgcggatcatcgtcgctgtacgaagaatcaacagacctaactcttccctgcatggcaggtcctttctgcacatgacatagctcctttctgaatgtctttgttctgtatgcattttgtttccgtcgaaactgttgcacatcaaactgttttacattcaacattatacagcgattgttttttaatgtcaatacacctgtgaaatgaatttaaaaaaggaagggaatttctcccctcctcatctttaattcagtaatattctgtcattatcaaattcttcttttttcttctctgaatacatatccagcagatcagaaactgtcatatgcttccgctcttcttctttaatgtcaaagataatcgcaccggaatccaacataatggttcggctgcctgttgtcagtgcctgccccatattgtgggtgatcatcagagtcgtcagattgcgctcatggacaatatcattcgttatggccatcaccttctcagctgtggccggatccagagccgccgtatgttcatccagaagcagcagcttcggtgtcacaatggtactcatcaacaatgtaactacctgtctctgcccaccggataaaagtccgatcttcgtagccatacggtcttccagtcccatatcaaagcgcttcagtgcttcacaaaacatctcacggtctttctttgtaatagcaaatctgaaaagacctttcgtgttcttggaataagccagtgccagattctcttcaatggtcagattcggtgcggttcctttcatcggatcctgaaacagacgtccgatggaagccgaccgctgatgttccggcaaataggaaatattcttcccatccagaatcacactgccttcatccagaagaaaattaccgcaaatagcattaaataatgttgatttaccggcaccattggaaccgagaatcgtcacaaattccccctctttcagggacagattcagatgatccagtgccttatgttcattgggtgtgccttttgcaaaggtctttgatgcattgatcacttccagcatatctatcttcctccatcactttctctcatcccctgtcgcttcagcttatcattcgccattttggtcttgatagccggaacagccaacgcaacggttacaataattgccgaaatcaatttcagcatgtacgccgggaacatatcggattttgttgccagggcaataatatagcggtacacaatggaacccacaatggctgaaataaaaccgatcatcagacttctgtggccaaagaaagcttcgccgataattacagaagccaaaccgacaacaagaataccgacaccggaattgatgtctgcaaagctctgatactgagcgatcagaccgccgcaaaacgcgatgcaggcattactgattgccagtgcgatcatcttcacagcatccacattaattgaggaagcacggaccatatcgacattatctccagtggcacgaatggaaagcccaagagatgtcttgaaaaataccgtcagtaaaacagtgacaatcacaactgccgcaatggcaacaaataatttgacggcatccttcgacataaaaggaaagaccttcaaaaacagtgtgaaaacagtatcgttattgagcagtgtcacattggacgcaccgcccatcacgaacagattaatcgaatacaatccactcattgtcaggatgcctgccagaaccggatgaatatccaatttcgtctgaagaaatcctgtcacgctgccggccaatgcgcctgcgataagtgcacccacaagtccaagcagcggatggcccgcagccgtcaatatcgaggatgctgccagaccgaaagtaaagctgccttccgttgtcagatcgggaatattcaagattctaaaactgatatagatgccaagcaccataatactgtaaagaaaaccaagctgcaaagagccaatcaataaagtcatacttttctacgtccttttcatttttgttcttttcttgcgtttaccccctgcatatgcagagggtaaacactatttcttctatatcatatatcatataaaattactttgcaatcctactttgcatcatctacaaaagttgctgtactctgtacatcttccgataaagtaattccaagtgcctcaagtgtctggttattgatcactgttgcggatgccggaacaacaactgccggaatatctgcaactgctgtgccttcaagaatctgtactgccatatctgcgctcatagcaccgatacctttatcactgattgcaactgttgcaaatgcaccggaatcaaccatagttgctgaactaccatagacaggaatcttcgcatctcttgctacttctgtgacaagtgtcatgctggcctgaatcacagaatcatttggaacaaagatggcatctacactgcctaccagtgactgagcagcctgctgaacttctgaagagttcgtcactgttgcttctttataagaaaggccattagcatcacagtattccttcgctgcttcaattgtattcacagaattaacttcgcttgtgcagtacaggaaaccaaatgtcttacagtccggtgtaagctgattgctcagtgcgaaaatgtcagaaacaggaattgcattggatgtacctgttgcattcttgtccgggtgatccatatcggtgataacgcctgctgctacaggtgctgaaacagcgataaatacaaccggtgtatcggtctcaagattgaccattgcctgtgtggccggtgtagcaattgtacaaaccagatcataatcgccgtctgccatagactgagcaattgtctgaaggttggttgcatcaccctgtgcacacttgtaatccactgtcagtttatcttctgtatagccttttgcctgaagttcttcaataaagccttcacgcatgtcgttaaatgcgccattctcaatcaactggatgatacctactgtataactgccatcggccttcgcgccttcggaatcaagcgcctctgatgcttcagatgctgcctcggaaacggctgcttctgtcgtcgccgccttcgtctcctgtgtggaagaagaaccacaacctgccagtgtcattgctgtcatcgccaaaatacatactgctgataataactttttcatgaaaattacctctctttcaatctttccttaaaatacaggcttttctatgaggagtttgcttcacagtcagaacacacagattgttttatctgcaaatcatttgcagttggcgcctcgggaaaagttcccataaaacaaaaaaatccgccctatgcaaaggacagatatatctgcggtaccacctttattgattataaaatccactcatcatgaaaatgccaacacattctctaccgttaacgccggtctacgtcctcagatactccgcatcatattcaatgcctttcccctggccctcaacggtccatttgctcaccagcgtctccacaggttctcagctcctcctgctctctgtatggtgcttatgtgaacgttatctccgtctcaaaagtttgatttaattttagcatataatttcagaatgtcaaccctatttttgataaattatcactttaaacggataaacttttgtgtaaagtcagcatctactttgcggctatcactcctacgtcaatttatacgccttttaggcaaagtggcatgctacctgatgtcccgtccgaatcgattttaaaaccggagcctcctgtctgcagatatcttttgcctgactgcatcgattgcaaaaaacgcagcctttgatctctcctgtcgggctctgtgcttctccttcaagaacataaatatccttatccgggtcatcataaattgaaaagacagaccctaacagtgcttttgtatatgggtgacgggcatgcattcggaaggctgctccgttcatgatttcgacaattcgtccaaggtacatgacaacaacctgctggctgaaattctccacaagggcaaggtcgtgactgataaacaaaatcgcatagtttgtttcatcctgatgctccttcaagagtgccatgatttcctgctgaatagacacatccagagcactggtggcctcatcacagatcaaaacctccggatgcagtgcaatggctcttgcaatggcaattcgctgcagctcgcctccggacagctgatggggatatttgtcaaaatattcctcaccgagataaacacgtttcaaggaataatacgccatctctctggcttcttttttactcttcttttcgaaatggatccagggctccatcaaaaaagtaccgatcttcattcgcggactgaatacattggccggatcctgaaaaatcatctggacatttctgcggtactcacggagtttttccccccgcagtgcaatattacggccattctgcatcccgccaataggctcatttttataatagatcatcccatctgtcaccggttcaagcagcgttaccatcctggccagcgtacttttaccgcagcctgattcacccacaatggctgtgcagatgcctttatgcaaagacaaactcacattatcaaccgcacgaagggttttatgatagcgcaaatcaaatgtcttacttacattttccaaacgtataatttcctgattattctccatctgtctctccctgcaatttcggtacaactgtcagcaatttcttcgtgtaatcattctctggatgataaatcacctgttctctcgttccgaattcctttaactccccgttctgcatcaccgcaatgtagtctgccatcttggatgcaacccccatattgtgggtaacgataacaatagctgttcccatcttatcacgcaaatccatcatctgcttgactacctgagcctgaaccgtcacatccaatgcactggtaggctcatccgccagcagcaatttcgggtgcatgctcatcgccatggcaatggccacacgctgtttcataccgccggacagctgaaaaggataggcattcatcacatgctttgtatccggcagtttcaaggttgccagcattttcttggcgatttcatagccctgcttttttgtcatggactgatgacaccgcagtgtctcaacatactgatcgcagacctttcgcctcggattcagataatcaccggcattctgaaaaatcatggccatgccctccccacggacatgacgcagctcttctgccgtcatcgccgccatatctttttcaccaaaaaggatctgtcccgatgccagctctccgcctgcgggcagcaatccgatggcagcacggatgagcgttgacttgccgcttccggattccccgacgatggcaacaattttgccctcaggcacagcaaaattgacatgttttactgcttcttttgtattctgataaataatactgacatccatcagttccaaaacgttcatcccgtgctcctccttttaaggattaaaattcattcgtattttgtaactgttcagagccaagcaaaatttcaaaaacaggtataaaatgcttgcatttttaagtctgtttttgaaattttatttggcggatacgccacaccgacgaaatgcatagcattttggaggttagctctgaacagataccatatttttactctacggtaatatcttttgtgataacgtaataatccgccaccggctgattggcatttttcacctttgacgctgaaaccatattcagataggaattggttagaaacagattggctgcatcatcattgagcacctgtgatgcctcagcggccagtgcataacggtcttctgtcttaaatgtctcagacatctttctgacaatttcatcaatcttgtcatcctggaaaccggtcagattctttttgccggatgtgccaagtcctgtatacattgtctcaagccagatctgcggatcgcctgtcggcgcagaattatcattggctgtatacagatcaaaattgccctgtgtctggtaatcagaaagattttcgacagaaagaatttccatatggataccgacatttttcagatcagactgaacagcggttgcaagaatagctgaatctgcggagccatgatcagcagcctgaagataattcagcactaattcagaaccatccggcatttcacggtaaccatcgttgttcacatccttataaccggcattgtcaagaatctctgctgcttttgcctcatcatatgtataggctgtgatcgtatcattgccaaacggtgtggaatctgagtaggcgctgtgtgcggcacttccccctatcaaatcggcataggcatccctgttcaccgcataagaaaccgctttgcgcagttcaagatcatgcagcggactcgtctctgcctgattcatatacgccacattgacacgcggactgatgatggatgagacattgtaagcttcattgtctgtaaacagagtcacacttgtattgtcaattgtatttgtcagatcaatttcccctgactggatagccatcgctctggcatcggcgtccgcaatctgtttcactgtaatgctatcaagaccggctgtgccatcccaataggttggattcgccgcaagcgtgactgtctgttcaggtgtaaaaccgctgaccacataagggcctgtgcagacaggcgctgtctgaatcgtttcttcactttcagttgtatcgataatatcaaataccggctcaacgagattgtttagaagggcagcattggcttctgtcgttttaatcgtcagatcctgtccatcggcctccatactgtcaaccttcagatattctgccgcacggtcattcatggaaattgcccgctcaatcgacgcttttaccgcttctgcatccacggccttgccgttactgaacatcacgccttcacgaatatgaaacttccatgtcgtttcatctacattctcccatgaatctgccaggcaggcctccaccttcagttcatcattcagcttcacaagtgattcgcccacaccaagacgactcagaacccagccattatagttgtttgccggatccagatctgaggcaatccagaaaaatgccacattaatatgcttgccgtcctctgcctcttgtgttccctttgtctgtccttcagcactttccgttgtctgatttgcggctgaatccgctgtcttcgccgactggctgccgccacatcctgataagataccgcaggccatcgtaaatgccattgcaatcgcagcaattttacttaattttccctttttcatatataaattctcccttcaacatatctttattactctatagccattcattttgctttctataattaaaacccacgcatcactcttcgaaggctatctgtgcctttttcctatgatgaataatgaacggcctcaattttctttcggatccagtatgtctcttaaactatctcctaaaagattaaatacaatcactgttataaaaatcgccaatccagcaaacagcatgatccatggtgctgtctgcaaatatgatttgccatcgtagagcatatagccccattccggtgtcggcggctgtgaagccagaccgaggaacgacaggccggccagagccagcatcatgccgcccacatccaaggtcgccataatgaccacttggggaacgatattcggcagtacatatcggaacagaatccctgctgttccgacaccgccgaaccttgcttcggtaatgtaatccttggtacgaatgacggaagccagtcctctggccattcttgcgtacttcgtccaccagacaaaagacagggcaatcactgtattcaaaagtcccggtcccatcattcccacaatagcaatggcaaaaaccgtgtccggaaatgccagcagaatatccgtcagacgcatgatcactgtatccagaagtccgccgaagaatcccgatacaatgccgatcaccgttcccaacacggatacaattgcaatcatgataaaggttaatataaaggaattgcccgcaccatacaaaattcttgacagcacatctctgcccacattgtctgtaccaaacagatggctgccgcccggcgcggataatttagccgcataatcagttgccagcggatcataaggtgcaaaatatttgccgaaaaaagcaataaaaaggacaagtgcaactgctgcaaggcagcaataaaaccggagccatttgcctttctctgtctttgccggtctgaaccaggattttcgtggctgcgactttctctctctcaggcggattttcgtggcttcactcatttaatccaccctctttctcagtcgaatctgagggtccagacatctgtaagagatatcgacgatcagattcactgtcacatagataatcgccatccagatgacatatccctgaatcagcggataatctctgacacggatagcttccacaaccatgttgccgataccctgccaggaaaaaatcgtttcaataatcgccgcaccgcccagcagatgtcccactgacaagccaagcagtgtaatgatcggaaggatggcattcggcagcacatgcccccagataatcctgcgctccggtatgcctctggctcttgcaccgatcacatagttggcattcaattcctccagaagtgccgcacggatctgtctggcataactggagatcatcggaattgtcagggtggcaaccggaaggatcattcccccaatcgaatccgtgctgacaaccttaaaccaccccagccgaactgcaaatatatacatcagcaaaagcgccagccagaaattcggcatcgagacaccgaagaatgacaggaaacgtatgatataatctgccgtttttttcttcttaaccgcagaaagaacacctaacggaaaagaaatcagaatcacagcaacaagagaaacccccgccagcttcaaggtcatcggcagcttcctcgtcatctgtgtccacacagactctccgaacttagatgattcaccgagatcaccgtgcaggacgttgccaagccaccgtccgtactggataagcaccggatcattcagccccatctcttccctggtcttttcaagcaactctgatgacggcatcatgcccatggaaacatatttcatctccgccgcatcactgggtgctgcctgagtgatcataaaggttagaaaggttactcccagaaggacaaccacaagctgtaccagtctttttaatatgtatttgaccattccatgtcacctacttaacagcgtaaatcataaaatgatcgatgacctgatgatctttgccatgctcgtcctcaaatctgcttctgtccacttctgtttccagacctttaacccccatctcaagcagcagattgatgtcccactgaggacgcttttctctgctgagaggcaaatctcttgccacattgttgataatatttacatccacattctcgatatatttatgttcatcgccatgatggatctgtcggatctcatattcctgacgatattcctcatcataataatgcagataataattgccgtcgtaattcagaatacagccaccctttttcagtacacgcagccattccctgtatgccttttccggatgctccagattccatgtgagatttctcgtaacgatcatatcaaaggtttcatcttcaaaaggcagcttctgggcatctccctgaacaaactccgctgttacaccggcagaagccgcgttctgctttgcctgattaagcattccgtcagaataatcaaatgcggtcatctgacagcccctctgaccaagcatcattgtaaaaaaacccggtccgcatccaagatccagcactttgggattgtccgcctttggaagatatttgtccaacagcgtcttccagtaagtcccctctttctgtgcatcctccatttcttccataacagacttggaataaccatccgcacgggtattccaataagatctgattgtctcaagctgttccatatgtcttctctccattctgttttccggcaaaaagtaaaaagaaaagcattcccgtttcaaataatgaaaacaaggaatgcttcgtacattctatagttatcccatccggataaccttctgccatttcatttcgtctcatctgtaaaaaaatcatctgcccgcttcgtaccggcaatttcaataaaaatatcatatcatgcagcggtacttttgtcaattaacgtgcttatacgtttttaacatagagtcattaaacataaaaaccagaggcagactacagattactctctttctgactgacgcttgttcgcagccaattgccgatattggtcaggcaaaacaggacgacaatcaaaaacaaaccaggaatcatgatgatccaccaggctttcgtcatcaatgctttatcagacaatgacaacagacttccccaggaaatcacttccagcggcagtcccatgcccataaagcttaatgtggactccgtaacaatggccgaacgcatattcatcacaaccataaacatgatcgcagagataaaattcggtccgagatgccggatgagaatatggaaaaatgatcctcccatacactttgaggcaacaatgtattcgcttttgcggagctgccgtacctctgtgcggacaacctttgcaatactgcaccagcttgtaataccgatgacaaaggcaatcgacaaagtggtcggctcccctaaaacagcctggataaaaataacaagcagaatggacgggattgtcaaaacaatttccgccccacgcatcatgatcgtgtccaccatgtcagaggccaatccgctgacagacccgtacagtatcgccagaactgtcgaaatcaccgtggcgatcacaccgactgagagtgagatcctgccgccataccagatacatgaaaaaatatcacgtccaagattgtccgtgccaaataaaaactcccgattcggtgcctttgtgtaattcatcagatccatataagagggatcctttgtcgcaatgacattggccagcagacagccaagtacaatcatgccaagaatggcaaaagaaacagacggcagcctgcgctttgtctgctctgacagaaccggggcactgatctgttttggaccgacgatccgaaatccattattgtccgtcgccataagaaacctccgatctttctgtgatctcattcgctttgattcgcggatcaatcttttcattgatgatctgtccgagaatattacagaaaataataacaataccggtcatcatacataaaaccatcagcatattataatcgccgtatctggcactctcataggaaagcatcccgattcccggataggaaaaaaccgattcaacgatataagttccgccgataatgtgcggcacggaaatggccataatactgacaatcgttggcataatatttttcagacagtgaccaaagacaatccttcttctgttgatcccgacagatttgaacagtgagacataatctgaacgcacctcctcgagcagcttgttgcgcaccatataagcgtaataccacaaatgttcaaagataacaacaatcatcggcataataagatgccggatccgatccagcagatcgccctcttttccaacactgtatgcaccggaacttggcagcacatgccagatcacactgaacataaagatgagcaacagtgaaaaccagaattcagggatacagctggtaatcgtcccaattgtcgagattgcccggtctaacaagctgttttcgtgggtggcacaaagcactccaagcaaaatggccccgacaaatgtgaggataaacccaatccctccgagcataagtgtattgccgattcgcttttcaatgacgattttgacatcctgtttgtatttaaatgagataccgaactctccgcgaaaagcattctgcacccatttgccatactggataacaatcggatcattcaatccgagacgttctctcgcccgatctttctcctccacagacattttctctgttcgttctccgtaatacgactgaagcggatccgtcggcgtcatacgggatatgaaaaatacaagaattgagagtgccagaatactgacaagaaaaatcaacagctttttcagatagtaaacaactttattcattttcaactgtctctccccttccttttgtcagcacaaaatggcctttttccacttcttttaactgtccttctgtatcataaacggtctttgaataatccggccgcactttttttctctctaatataggatcaggaacaggaatcgctgacaaaagatccttcgtataaggatgcagtggggtttcataaagcgcctttgtatcagctaactcaacgatcctcccgtggtacatgactgccacacggtcacacaaaaattctaccatcgacagatcatgggcgataaaaacaatggagaacccatgatcttcctgtaaatgtttaaacagattgataatctgcgcctgaatcgacacatccagtgacgctaccggctcatctgcgatcaaaagatccggttcggttgtcagtcctctggcaattgcaatacgctgtctctgaccacctgacatctgagatggataacgatcaagaaaactgtcatccagtccgacatatttcaattgaaaagacgcttcagcctccgcagagcctctcgctgtccggatatgattaattctcaaaggctccgcgataatatctttcgccttcattctctgattcagacttgatgcggaatcctgaaaaataatctgacgctgtgtctggagaaactttttgttctccctgtatgcttttttgtcaaaaatatcgataccttcaaacagaacctttccggacttcggttcatagacattcatcagacatctggccagcgttgatttgccggaaccggattccccgacaatccccaatatctcaccttttctgacttgaaatgaaacgtcatcgacggccttgatcgatacctttttgtttaacttaaaataatgcgtaagatgacttacttccagaatattctcactcatcgtttcttcctctttttattggacattcaatctttggagccctcttatccaaaagccatgtcgccgcataatgtgtcttcgtaatctgaaacatcggcggttcctgctcataatcaatgccaagtgcatattcatttctggccgcaaatgcatcgcctttgggcagatgcaccagtgacggcggcatgcctggaatcgtatgcagacgattctgtccccttgaaaagcctggcagcgaccgcatcagcccccatgtataaggatgtctagggtcataaaaaatctcttttgcagtgccgatctccacaatcttaccggcatacataatagcgacacgatcagccacccttgccaccacaccgagatcatgtgagacaaggatcgtcgctgtatcaagctcctgctgaatcatcctgagcaggtcaagaatctgcgcctgaatcgtcacatccagtgccgttgtcggctcatctgccagaagcactttcggattggaggccaacgcaatggccatcacacttctctgtctcatgccgcccgaaaaattataaggatacaggttctttctctcctggggttcctcaatccctacaagatgcatcagttccagtactcttgcattcacttccgctttcgtcatatctttgtggtgtacgcggatcgcctctgcaatctgactgccgatcgtataggtcggatcgagtgcggtaagcgggtcctgaaaaatcatggaaaagaaagagcctcgcagcttttccatctgacgttccgtatagtgtgtgatgtccgtcccggcgacataaatcgatccggcagtgatcttaccgctttttggcagcaggccgatcacactcttacagagcatgctttttccacatccggattctccaacaatcgcaagcacctcgcctttgtgaagggaaaatgagacatctctgacaggtttgaccttgtccttctgtcgtccgatctccacagacagattttcaacttttagtaattccatcttcgtttccttttcattcaaaccatgaagaaaaggggctgagcacaaccccttcattcttcgtatatgactttattcgctgattgtccagtcacagacattccagaaaataccaacaccgtgatgaccaagaaccatgttctgatcgataccggaaatattcttcgcgccaacatacatggcatcaatataacagaagaatgtgaaagccggtgtcttggcaagttctttctggaataacgcatactgcgtcattctctcgttctcatctgttgtctcacgtgctgcttttaagtaggcatctactttctcattggagtaaccattgtagttggcacccttatctgtaccaaatactttgtatgtgtggtcatccgcatcaaacggtgaaccccatccaatgatacagcattcctgaccgccccagtcaataccttcagctggcacttcagccctgacatccagtccagcctcttttaactgttgtgcagcaatctgagccatgtcgattcttacctgatctgacggtgtcgcatcaattgtgaaaccgattctcttgccgtctcttgtccagtaaccttcatcatctttctcacagcctgctgctgtaaatgcttctgctgccttgtccagattgaaatcatatttttcaacatcttcacagttgtacttattcttctgtaatggtccgtaagcgatctggccgtgtcccaataaaacagcatcaataatcgcctgacggtcgatacagtagttgatcgcagggatcagatctgcattctcctgccagtattcatttctgaaattgtacaagatacctctgtaatcagatgtgctcatcgtgtaaacattgtaagcatcgtcgccttcaaaagtcactgcatccttcggtgttacctgcgccaggttcaactcgccggacttaagctgtaaagccttcgcattgtcatcactgacaatcttgaatatgatagaatcaatcttcgcaggtcctgcaaaatagtcttcattcttctcaagcacaatctgctgaccttcatcccatttagccagcttgaaagggcctgtacctacaggcgctctgaagaaatcggattcctgcatattctcaccttccagcagatgcttcggcagaatcggcatcgtcatgtaatctaaaaatgccacgtttggtgcggaaagcttgaattctattgtatggtcatcaatgactgtgatgctctccacatcctcgtagtttggtgcattctctgattcattggccggatccatgatggcttcgattgtgaacttaacgtcttcggctgtaaaaggttcgccgtcatgccacttcacaccttcttgcagatggaaagtgtatgtagaattctcttcatcataatcccaggacttcgcaagtctcggaacaacctcgttattgccgtcatggtctgtcaaaccatcaaaaatcagaacattgatctcgccatgctcatccatcgccggattgatccttgtatagtcattcgatccataaacaattgttccgccgccttctctggcttcacctgattcagctgcgcctgcttctgtctgcgccttagctgtctccggtgccttctcgctgccattacttccacaacctgaaagcatgccgcaagccattgtcacagccatcaaaagcgcagctgccttccccattctcttcttcataaataacctccattgttgtttttatttaacttcagggcacaaaacgtctcttcgttcatccccaaaaagattaaatacatcctctttttgatcagaaggaaacaaaaaaaagcatccctgattcttcattcaaataaaaaatcagaaatgcttcgtacattctctctgtctgttatcaacgattcatcttcgttctctcttcatgataaccttctgctatcaatgccattccaatctgctgttcttcattcaacatcacgcgcccgcttcatacaggtcaatttattacagtcatcataccatcattgacaaattttgtcaatacgtgtgcatattagatacacgacaaacgcatgaatgattatctgccatcaatcctctttatattcggtgatatcattcccataacacatcctcaatatattccatccaatctaataattcctgcatataccaacgccccttttcttttaattttatcagaaagggacgtgttcacaatttatttactcatgcgtttgtcgtgtttcctccaccgtatattcctcaatttctgtctttgtcacctgtttgatatgcttctttttcagacgcagatatacgaattcccgaaaaatagtataaaacacggacaacagcggaataaaaacaagcatacctacaattcccataaggtttccaccgatcgtaactgctgcaagaacccagattgacggaagccctaccgattcacccacaacatgaggatagatcagatttccctcaatctgctgcagcaccagaaatactataatgaataaaatcgcctgttccggacttaccataaaaatcaaaaagcttcccactgcacatccgatgaaagccccgaaaattgggatcaatgcggtaaacgcaatcaaaatcccgatcaaaagtgcatatggcatcctcaaaatactcaatataacaacaaacatacagccgaggatcacggcttccagacactgacctgcaagaaaatttgcaaatgtccgataagtcagagaacagactttaagaaaagcatctgcttttttccttggaagaaaagcgaaaattacttttcggatctgcacgtgcagcttctccttctgaaaaagaacataacaggcaaatgaaaatgcaataaaaaaggttgccaatccactgactatggaacccaacgctgacattgtggtattcatcatatttcctgcaccattttcaagaaagcttatcccccacttgattgcctgatccggattaaactgtacctgatctaccagcttcatgacttcctggttattatgggaaaattcccggatccagctttgcatctgcggaataaaatcagcgatgctccccatcagggttcccactgtccgcgtaagctgcgggatcacgccaaacattaccagtacgatcacgccaaccgcaaatacaatcgtaaggagcaggcttatcggtcttgccagttttacgactatcttattttctttttttactcttccaaaaattttcttttccaaaaagctcattggcacgttggtcacaaatgcgattgctccgccaagtacaaagggaaataggatttcccatattgctttcagcacatcgagcaccacatcaaatttccacagggcgaccacaagaagtgctgtaaacacaataagctcccggattttttttatagtaattttacttaaatccactatcgttctcctcttttcttaatttgttgaatcattacataaaatactgtaatccaaaagacgtctttgtgccagatctgccacatcaattgcagctgctgtgctcctttaccatcttctgtgttccgaaagaaagaacaattgtcacaatagagcttaacgcttgcctccttttttacaaatattcaccaactgtaatttttttatgcaataaaggatttttattgataagataaaaaaaagaaacccttattgcataacaaaaaatgcaataaaagtctcaccattttcctgcagcgccggatgtttccaccgtactgacgacactgcaaacgcagatttccaaacgtaggttactcccctttatcagatttaataatataacagaatcggtatctctgtcaaggagaaaatcgatactgcttgtcaattcgttaaagtcgtgctatagtaatttcatggttagtttcaactaattagaattactttgagcaattacacatacaactatctatatattttatactcagggattggaggtctgatatatgaatctgaatatattttatggtattttaattccttttctcggcacatccatcggtgccgcctgcgtattcttcatgaagaatacgttaagtgacaaaattcaacgggcattaaccggttttgccgctggtgttatggtggctgcatccgtatggagcctgatcattcctgccattgaacaatccgcatccatgggaaagctgtcttttcttcccgcagccatcggtttctggatcggcatcctgtttctgcttctcttagatcacatcattccccacctgcatcagaacagcaatcaggctgagggaccgaaaagcaaacttcagcgcacaaccatgatggtactggctgtgacgctgcacaatatcccggagggtatggccgtgggcgtagtctatgccggttatctctcagacagcacaaccatcaccgccgccggtgcactggcattatcccttggcatcgctatccagaattttccggaaggcgccatcatatccatgccccttcgcgccgaaggtatgaagaaaagcaaagcctttgtgggcggtgtcctctccggtatcgtggaacctgtcggcggcattttgacaattctggctgcccattatattattccggccctgccttatctgctgagtttcgccgccggcgctatgctctatgttgtcgtagaagaactgattcccgaaatgtcccagggacaccactctgatgtgggcaccctgtgttttgctgtcggattcagtctgatgatgatactggacgtggctctgggctaaatgaccattgtataaacgaaaatcatcaccggcatgctgatgatggaacaaatcgttgtcagcacataaaacatgctggactcagccgcattgctgtcatagagctgcgccatagatgtgacggttgcgcaggccggtgtgatacaggccagatacacgatcatcaaaatatttttaccgtcagggatcatacccgccgcgccggacagcttaaatactgccagtatgatcaccggatacacgaacagccgcagcaggacaaccagataattacgtcctgtcataaagacatgctttaaagggacttctgaaatcgccataccagccagcagcatgcccatagggcctaccatgtttgccagcatatcgatggttccgccgataacatccggcaaatggatctgggtgaaaaataaaataatccccacatagatagctaccatgttcgcattcaaaaaaatactcttcagctccagtttctggccgctgcataatttttgtttgcagtgcgtccacaaaaggatgatctgaaccacaatgaaactgcaggaatagatcacatagtcatcccccaacatagcctggaccaaagggatgaccagaatacccccgtttgtataaatgactgtcatctgttcaatggtatccagtcccagcaaccgcttaagcagagctgtcactgcaataaaaatcaaatggacaataacagatgctgcaatggtgaatatcagacctgtacgcacctgaggggtataatcaatctgaaatgcattaatgatcatacagggaagtatcagatagacaagaattaccgaaacacttttactatccgatgccttcaataatccaaattttacaagcagaaaaccaagcagcagaataatgaataatttgataatctgctctgttaaaattaaactgactgccataacctttcttcctttcattttcattcaatcactgcggcttcacaccgcatctttcatcagttatacacctgtcatctctaaaatgctatcccatttcttcatttaatacaaaaatcctgatgaaaaattgatatagttcttcaacttttcatcaggattcatccttacgcctgcagtaagtcgtccatcactttttccactgtctctatcttctcagcccgccaagcatcagcaccgcagaataatagtgcttcatcagtttcaccctttgccgcatggagcagagactccgtaatgcaataaggaatttccgaaggcttgcagcccttcatgcagagcaggcacttcttcggtgatatcctttcaccggccatcacccgctccataaaagaattcataatggccctgcccggcatccccacaggacttttcacaatctgaatatcttctttatttgcccggatataagcttctttgtaacggatatctgcatcacattcttctgtcgttacaaaacgcgtcgcaacctgaatgccatccactccaaggctaaaagcatgctttgccgctgctctgtcataaatgccgccggccagtacgaccggaattgaacaaccgtatttttcaccatattttctgacaacagccatgatttttttcacttcatcatcataacttttttcggcatattctttatcatcatattcagcatattcttccaactgttcacgactaaaaccgagatgcccaccggctttcggtccctcgatcaccacaagatccgctgtacgatggtattttctgtcccagtatttcaggataaccgccgccgaacgttctgttgatacaatcggtgcaatcttggtctgacttgctgctgccagtcccggcagatcaaggggcagtcccgcacctgagatgatcagatccgcaccggcttccactgccgcccggacatgtccctcataatctctcaatgcagtcatgatattaaaaccgatgatccccgtcggtgcaattttccttgctttagccagttctttgccgatggcccttcggcaggcttccgccggatgttcttcaaaatccggctcccgaaaaccaatctgggccgtcgagatcacaccgacgcctccggctttcgccactgcacccgccagccctgacagactaatgccgatgcccatgccgccctgaataatcggctttttgactgtcagatcaccaatttttaattctggatatgtcatcataatgccctgaacctccgatatctcatctctgcaatctcatcccctgtcattgccagctgttttctgaaaaatattttcatacatctgtccattttcagtgtcagttccggcagtgtctctatggtgagatcttccggttcttcaaaaacacgctccaccatgccatgtttttgaagatctgccgccgtcagccgcatcacagctgccgcctccttcgctttatggctatccttccagaggatacttgcaaagccttccggtgagagaatggagtaaatagaattttcaagcatccacacttcatcggccactgccatcgcaagcgcaccgccgctgccgccttcaccgatcacgattgacagaaccggtgtcttaagaccggacatttcaaacagattgcgtgcaatggcttctccctgcccacgctcctctgcttccataccgcagaaggcacccggtgtatcgacaaaacagatgaccggtcgatgaaatttttctgcctgtttcattaaacgcagggcctttctgtagccctctggtgacggcatagcaaaattgcgcagaacattctcccttgtattacgtcccttttcctgggcgatcaccgtcacaggcatcccgtggaatctggcgataccgcctacaatggccggatcatccccaaaatacctgtcaccatgcagttctgtaaagtccgaaaataaatcttctatatattctgtgccgaccggtctttccttctttctggaagccagaaccctgtcccaggcagatttcttttcatctttttttgcaatggataattcttcactcatattcagatccggattctcagatgacactgacacttccttatagtttctgagtctttgctccgcctcaggatttttctcatgcagtgacagaagatgctccagacgattcttcaggtgttctctttctacaatctgatcaataaaaccatgttctaagaggaattccgaacgctgaaaacccttcggcagcttttgtccgatggtctgctcaatgactcttggtcccgcaaaaccgatgagtgcattcggttctgccagaataatatcccccagcatggcaaaactggctgtaacaccgccggttgtgggatttgtaagaaccgagatatagagctgtcccgcatcatgatgtctttttaaggcggcagatgttttcgccatctgcatcagagaatggataccttcctgcattctggccccgccagagcaggcaacaatgatcaccggcacctttcgctctgtggctttctcaatagctcgtgtaagcttttcaccaacaactttgcccatgctggccatcataaaatggctgtcacacaccgccagtaccacttcatgaccgccaatccttgcaaggcctgtagtcaccgcttcatcaaggcctgtcttctcacgaagagcttcaactttatcttcatagcctttgtaatgcagcggatttccggatgtaaggcctgtatcccattccttgaaactttcctcgtctgccagcatctcgatgcggcgtcttgccggtacactaaaatagttgccgcatttcgggcaaatatactgattgccaataatactttctgccaataacaccgctctgcaggcattgcatttgcgcatcagcccttcaggcacctccggtgatgactccccggagttttgaacattggccttcctgtttgtcaatgtaatgtaatttttctgattggtctttttaaacatatttccaagcttcattgttcatccctcctgtcattctgtcatcttgtcacttcaccggcttttttcattgcccgtcatcagcaatcgttttttcgctgcctggcattatcaatatttcctgccacgctgcaaaacattttacacttcagctgcataacgatggttcagtaattgttcctctttatctgcaataaattcaatatcaaaatcaccgttctgataatccggatcatttaaaatctcatattgataatccacattggtatcaatgccctcaataatcacttctcccagagcgctgcgcatctttgtgatggcttcatttctgtttttcgcaaatacgatcaatttcgccagcatattgtcatagtacggtggtacttcataaccgctgtaaatggctgaatcaatacgtatgcctttgccgccggggagatacatatctgtgatttttcccggacacggccgaaaacctttataaggattttccgcattaatacggcattcaatggcatgtcccgtcagcttcacatcctcctgagtataagacagttcccgcccgtcggcaatacggatctgctctttgatgaggtcaatccctgttacccactctgttaccggatgctccacctgaatacgggtattcatttccataaaataaaaacggccggttttttcaagcaaaaactcaatggttcccgcattgacataccctgcagcctttgccgcatttaccgccgcttcccccattttctgacgcagtgcatcattcataatggcacaaggcgattcttcaatcagcttctggtgatttctctggatggagcagtcacgctcgcccagatggatcacatgaccataactatccgccagaatctggaactcgatatgtttcggatgctccacaaagtgctccagatacatagtattatcgccaaaagctgccatagactccttctgggctgtcataaaagcattttccagttcatcctgatgataagccacacgcatgcctttgccgccgccaccaagggccgccttgacaatgaccggataccccacttcttctgcaatggccaatgcttcttctgcatgatacaagggttccttgcttcccgggatcaccggtacccctgccgcgatcatcgtatttctggcattggatttattgccgagtttgcggatgacatctgcgtttggtccgatgaaaataatatgacactgctcacataaagctgcaaatcgatcattttccgacaaaaatccgaatcccggatggatagcgtctgcaccggatacaatggtggcactgatgatctgctccatattcagataactttcagaagaaggcgccggcccgatacagatggcttcatccgccagctgtgtatgaagggcttccctgtctgcttctgaataaacagccaccgtttctatgcccatttccctgcaggcccggatgatacgcaccgcaatttctccgcgattggcaattaaaacttttctgatcatctttattccccgatagccagtgtcagttcggctttgacagccacttctccatccacggaggcaatggcctcgcccacaacaacaggtcctttctgacgaataattcttgcttccagtttcaatttatctcccggcacaacttttcttctgaaacggcagtttttgataccgccgaaatagccaagcttgcctttattctcttcctgcatcagcacagccactgcacccacctgagccagggcttcgatgatcaataccccgggcatcaccggttcctgtggaaaatgccctgcaaaaaagtcttctctgtatgtcacgcatttatagcccacagcatattcgccgggttcataatcttcgatataatccaccaacaaaaaaggatgtctgtgcggaagaatctctttaatctcattaattccaagatgtttcattgatctaacttctttcttatatattacaaaatcagttcagcacttatctgcacagcctaggcaattctatacaacctaggcaattctgaacagcggctggccatattctaccatctcgccgttttccacaagaatttcagccactgtgccgtcaaaatcactctcaatatcattcatcagcttcatggcttccacaatagccactgtctgacctttttttaccgtatcacccacagctacataaggggctgcatcctcagcaggtgcagcataaaatgtgcccaccaacggtgatttcacaagaaaacctttctgctctgcctcttttgttccggctgccttctcctctgaatctgctgaagcttctgacattgctgatgctgcaactgcctgcatcggcatcactgactggctgacaccggccgccggcaatgtctgtaccgctgtcactacttctttttccttcttcaggttcagacacacaccctctgcttcatatttaaaacccgtcagttctgaatctgacacggcccgtatcaattttaaaagttcatctaattccatttttacacctggccttcatacttcttgaaaagaagggacgcattatgtccgccaaacccgagggaattgctgatggcatactgaatatctttctctacaggtccgtcaatagcatagtttaagtcacagccctcgccaagttctttcgttccgatagtctggtggataaatccctcttcaatagccttcactgaaacaatactttccaccgcaccggcagcacccaaaagatgaccgatcatggatttcgtcgaattgatgacaagatttttggcatcctcgccaaaagctttcttaattgcctttgtctcaaaaaggtcattgtgatgggtacctgtaccatgggcattgatatactgtacttcagatggagcaatgtctgcctcttccatggccagttccatagctttggcggcaccgctgccgtcctctgcaggggatgtgatatgataagcatcgcctgtagcaccatagcccaccagctctgcataaatatgtgcacctcttgctttggcatgctctaactcttccagtaccactacgccggcaccttcaccaagaacaaaaccgcctctttccttgtcaaaaggaatagatgcgcgatccggatcctggactgtggttaaagctgtcagtgctgtaaaacctgcaaccgctgtcgggcagatgcagctctctgtaccgccggcaaacattacctccgcatccccatactggatagcgcgaagagcatcaccgatacagtttgttcctgtggcacaggctgtcaccacattagtacacttgccttttaaaccaagctggattgacacattgcctgccgccatattggagatcatcatcggtacaagcagcagattcactctgcccggtccctttgtctcaatggtctggcaggctttttcaacctgctgcaggctgcccacaccggaaccgatgatcacgccgcagcgataaggatcttcttcctcaatattaaagccggcatccgcgcaggcttcctttgctgctgccaccgcatactgtgaaaaagtctccatacgcttcgctgccttgaaatccatcagctccttcgctgaaaaatccttgacctctgctgcaatttttactttataatctgtggtatcgaatttggtaattgacccgataccgtttttgccttccttgacattcttccagaaagtctctacgttattgccgataggtgtcactgcacccatacctgtaatcactactctgcgcttttccatcattttctccattctgaaatctatccatatcacctatataagcaatccgcctacatgaccatgccgccgtccacgtgcagcacctgtcccgttatgtaagccgcttcatccgacaccagaaaggctgccgcattggccacatcctctgcctgtccgaagcgcttcagcggaatctgcttcatcatctcatccttcactttatctgccagatctgccgtcatatccgtttcaatcattcccggagcaatagcattcaccgtaatgcctctggaagccagttctttggctgcggattttgtcaggccaatgatacctgccttggaagctgaataattagcctgtcctgcattgccggccacacccacgacagaagccatattgacaatccgtccatagcgctgacgcatcatctgtctggctgcaaaccggatacaatgaaaagtgcctttcagattcacatcgatgacactgtcaaaatcttcttccttcatggccatcaacagtccgtccttcgtgatgcctgcattattgatcagaaaatcaatccggccgtatttttctgtcacagccttgaaaaaagcttcacaggctgcaaaatcactgacattgcactgaaaaatatccgccctgccgccttcatctatgatctcctgctgtacagccgcagccttgctttctgaaccattgtaattaataattactgtcgcaccgcaagctgccagttttttggcaatggcccgtccgatacctctggaagcaccggtcacaactgctgtcttcccatcaaattttcccatttcgttctcctgtttccatcccacatcaaatgattaattgtctaagttcttcaataactttctgtgcgtcctccaccgtattcactgtgtaaacttttacattacggttaattttccgcataaaacctgccagtgtctttcccggtccgatttcaacaaatgtatccacgccatcggcgatcattcgctccatagaggcctgccatctgacagaggaagctacctgttttgccagaagagctcttgtttcatgaatatcggtgacatattccgctgtgacattggtcacataagggattttcagttctgaccactgcatatctgccatctcctgatccagcgcttcgccggccggaatcatcatcggtgaatggaacggtccgctgacattcagcatgacgcatcttctgacaccggctgcttttaatgcttccaccgcctgctccaccgccgattttttgccggtaataacaatctgtcccgggcagttgtaattggcaatgctcacatcctcaatcggtgccagacatttttcaatcagctctgtttctgcaccaatgacagccaccatggctcccttaccttttggtacggtattctgcataagaattccccttttacgtacaagacgaatggcatcttccgttgtcataccgccagccaacgcaatggcacaatattcgccgaggcttaatccggctgtaacatccggattaagtcctgcttcttccagaacagccgtcatggccagacaggttgtcaccatggccgcctgtgtatattccgtctgatctaataaatcattctcttcaaagcacagcgctttcatatctatatttaaaatctctgaggctttatcataaatctccgccgccagagggctgtatgcataaaaatctttgcccattcccgctttctgggcaccctgtcccgggtaaataaacgctattttattcataatattttctcccaaaacattcttctgtctctctcaccagtttccggatcagatcatgacagttcatcacttctttgaccatggcggcactctgaccagccatgacactgccattcaccacatctccgtccacgacagcttttcttaaaccgccgagggtcaaaagctccagttcttcaaatcctgctccggatttttccagttccagatacttcttcgtcatctgatttctcaatgctctgacaggatgtcccgttgttcttcctgttacacgggaatcgatatcttttgccttaataatggcttttttataattctcatggacctgtgattcctctgttgtaacaaatactgttcccagctgaaccgctttagcccccagcataaaggctgcggccataccgcggccatccgcgataccgccggctgcgattaccggaatcttcactacgtcaacaatctgaggcacaagaaccattgttgtattctctccaatatggccgccggcttcacagccttcagccaccactgcgtctgcaccgcagcgttccattcttcttgcaagtgctgtggaggctaccaccggaatgactttcacaccagcctctttccacatctgcatatatttttcagggcttccggcaccggttgttacaactttcacgccttcttccacaatgactttcgctacttcatccgcataaggactcatcagcataatattgaccccaaaaggtctgtctgtcagctttctcgctgaccggatctgttcacgcacccattctgccggtgcactggctgcgcctatcagtccaagtccaccggcatttgatacgccggctgcaagatgatactcagcaacccaggccatgccgccctggataatcggatattctattccaagcaattcggttacttccgtcttcatattacaacctctttctgtctgttttgatgtctgtcttttccgtcaatacagcattctgttttcctgctgttattcttctattcagctgttaccctgtctttcttagttctgatgagctgtcagataatccaccacatcaccgatagtctttaaggtgcccatggaatctgcatcaatttcaataccgaattcatcctcaaaattcatgaccatatccatcaggtcaagggaatctgcaccaagggattcaaatgttgtctctgcattcagattaccagcttctactccaagtccttctgctacaattgcgattactttctctaacataattttgttctccttttcgttgatatatatatttttgtaactgttcagagccagcctccaaaatgctacgcatttcgtcggtgtggcgtatccgccaaataaaatttcaaaaacagttttaaaaatgcaagcattttatacctgttttttgaaattttgcttggctctgaacagttacatatttttattatgtaacttctgtctgtaccccatccgaagatgaaatgcatcccgtatctgatgatgcctgccgccctgagacgaattatgcctcaccgcttcagattcgaattatgcatgccactccatatagacagcgccccatgacagaccggcgccaaaaccggccataatgattttctgtccatctttaagctgactacttctgttcatctcatccaaaagaatcggtatgctggcggatgaagtattgccacattccgcgatattcatcgggaacttcgcgatatccgattttaaccgctttgctatggcttcaatgatccgctcattggcctgatgggtgataaaccagtcaatgtctgcctctgtgcaatgcatctgtgtcatcaaagactttgccatctccggcatctttctcaccgcaaacttaaaaactgccgtgccgtccatatcaatgtaggtcttacggtctgcttccttctgctgccagtcattctgcacgcggctctcacaagccaatacatgacccatggtgccatcagagcctgcaaccgaaggataaagctctccttcttcagcctgaacaacggctgcaccggcgccgtcaccaaacaggatacagctgcttcggtcctcccagttattgatggctgacagcgtctcgctgccgatgagcagaattgtctgatacagccccgccgcaatatacgcctgagccgtctgataagcaaagacaaatccgctgcaggctgcactgagatcaaaacatactgcccggtctgcccccagagccgcctgaacctgaaaagccacaccgggaatcacagcattcggcgtaatggtggacaccagaatcatatcgacttcctccggcagcacatggccattctcaagggcccgtcttccggcctccacagccatactcaccgtggtctcgtatccagatgcaatgtgtctccggacaatcccggtccgctcgcgaatccatgcatcactggtctcaacaatcttcgcaatatcattattatcgtaatatttctccggcaaataagaacccgtgccgcatatcctgcctctcatagttcatctccatctgtccaatgactgttttgaattttagttttaatataaaatctttttgatttaaaatattttgaatttcaaatcttttgatactataacataattaacagaagttggcaagtagttttttaaataaaaaaatagatgagaccctatataatatgaatctcatcctttatctcaataatcatcaagcttttaaatcttgcttattttgactgatgattacagtatatctctaataaatttttctaatcatttgtaccattgattgtccatcatctggtattttcgctatttcactaaaatgattctctttgtaaaattgaagtaatttttcattatccctacattcaatcatcatatatcttccgcctacagcatccacagaagctgcaattacatcactggcaaattcaattaactgcctgccagaaagattattctcaggtatattggaatttttcgataactgccctattagataacacggaaaatcattaattatctcaccatgtattttagcactaaatccgtccaactcttttcttatgcgatttgatatcgattccggtacagttaaaatctttaaagcaatggaaatatagccatatatttttaaattatgtacatttctatcgttttctaattgcctttgactacagaccaaatacgttcgcgctttagaaagcttcttaaactctactgccctattatgtaaaaagtattcaatatctttatcttgtgtgcattcaaatgtgtataaaaacaattctaattctttttctttatctaactgttttatgaatgttcttaacgggacaagaattgcttcaataaacgttcactcctttctctctctactgaggaaaagggatgttgtgacaaaggctttactggagcatcttcctgcataacctccattaactttttcacagattctgtagtattcagttctatctttcggtcaaaagtacttgttgccattttctttccctcctaaaataatttacaaatacgctgcctacaataatattatactcaattatcctcaaaacatcaatctaattttacattttgtgtatttatatttctataggaacttaaatacataacagatgacaaaaatatcccgattaagctgcaattaacaattacacttatcaggatatttttatatctaaatcagttagttcattccattttcttcgtttagctgccctaatcagttccatccgcacttcttcattcggaataaacgctctctccttgtcctggtcataagccaaatagccaagatgaatcacatcatactgattcagatgctttttaaaatcaggactcttaccaatttccaaatcagcaaaaatagtctcaaaatcacagcctttgctataataggccgtcagcatattggctgtaattgacttgccaaatcttctcggacgactgttgcaaatatatgcctgtagtgttccggttactttattggtatactcaagcaaacccgttttatcaacataaatactggaagccaatgcaactctgaatgcatcatttcctggatttacaaaatttcccatccgtgcacactccttttctgcaatttactttcaaagttcctgcgaaatacactgccttaatcataccatactgtagccatttcctcaacttacatctacaccagtgtctctggcaatttgcaatactcctgatatttttaaacaaatttttctgcttaataactaaggcttgaacaaccatgccattcaagccttatcaattcaagatttatctctgcctatttggaaatactatccaaaaaatcagccatcttctgccattcttccccgcccactgcaagttcatatgaaagaccgttgcactctacgatgattgcatctcctttatcagatgctgtttcagtaaaatcactgctggaaaaattcaatgtatactcactacttgttatactatcgaaaaaagcctcggaatacttctcatctgttggattcttcagtccaccgcacatttgattaaaagatttccattatctatttcattcaaaacaacctgcttaatattcagcccatctgttagctgcaataaacatctatgtttatccctggtagacaattttgccggcgcagatagtgtaatgaatcttacccggcagctcccatcctttaaaaggactgttggatgcctttgatgcaaaatgatccactgtccaacgctctttttcaccaaagattacaagatcagccggtgcatcctgggtcacactgcccgggatcatacgataaaactctgcaggattcttactcatgcaggccatcagctgtaacagtgtcagatgtcccggttcaaccagtgaaagcaggccaaggccaagagaagtttcaaggcctgtgataccgcttggtgcttccgccagcggcttttccttttcttctgtgctgtgtggtgcgtgatccgtcacaatcagatcgatggtgccgtccttcagaccttcgataatctgcaggcggtcattctctgttcgtacaggcggattcatacgtgccagtgtgccgtattttagcacagcgtcctctgtcagtgtaaaatgatgcggggttgcttctgcatggacatctgcgcccattttctttgccatacggacaagttccacagagtttgctgaactaatatgctgaatacagaccggtgctcctgtatgcaatgccagcatacaatctctggccaccatcacatcctctgctgttctggaggcaccgccgtaattcagctgttcggaaatctttccctgattcacaccggcctgcttcacaaacagcgggtcttcttcgtgcaggctgattggcatatccagatctcttgctttctccatggccgccagcaaaagcttctcatccatgatcggaatcccatcatctgtgaaacctgcagctccggcttctgccagtgcatccatatctaccatctcctgaccttttaagcctttgctgatggctgctgcctgaagcacatgaataccggtcttttcgcctttttcctgaacatacttcaatgtttccacattatctaccgtcggctttgtattggccatgcacacaaccgttgtaaaaccgcccttcgctgctgctgctgccccagtcagaatatcctccttgtaagtctgtcccggatccctgaaatggacatgggtatccaccaatcccggtgccacaaccagatctgctgcatcaatcacctctgcacctgccgctgacagattgtgtcctacctcctcaatatgtgcgccctcgatcagcacatccatcacttcatccacacccgttacaggatctactaccctgccgttcttaattaagatcattttcagtcctccaatttcttcttcattctctaatctatcagcatctgataatcttcttttgtaaatcgatgataaatggtatgtcccatttccatcttgacgcaataataataggcatcatattccgcatcgtcaaaataaaccgcataatcaaaatccgtacccggtgtcatcttttcacaatggtaggctttatcaaactgcgcaaagcaggcacagatttcttctattgttaagctgtgatgatgtgcaaacagctcgactattgctttgagaaaaggcgggtccgagatttctcctgccacatactccgcaccttccgcaggcacacgcacctcaaatcgcccttcatggataaaaaacttcaatctgccaagcaccgttgtatcaaaaactgtatttgttctgagcgccgcaagcatctcctgctcatctgtataattggttcccaggatggcattcatagacgccataggaaaataaagtctgatcacttctttctccgcccccagcttcagctgtgcctccttaatctgctctatcacattttgaattaatttctgctcattcatattctgctccattttcattttcggctataaaccatatcagttttattttatcacattactatcacagactccacaaaaaaagaagctgtgactcattgtgacatgctcccaccacttaaatcacagattttgaagcgggggcttcttgctcaatggctctactgagccaagtatctacaagctatcctcgcgtgccccgcgattcatttttcccagttatgggatattttcattgtctggatacagacacttcccatttatcctgctaacaacatgcggcgtgcttcttcatggtagaaaatatataaagatagatacattctatgccagcagccagttatgttcggtttgcggataccaaaatacagagatgaaagatttatcaataagagaatggtcgtgtcctgtttgtagtgcaaaacatgatagagacattaacgctgcaaaaaatatactggcggagggattacgacaaatagcataagaagaataactatatagggcagggactgcccgaatttacgcctgtggagatagtaggtcacgaggtctgtgaagcaggaagcccattggctttagacaatgggtagttcacattgattgaaaagacaattgatgtttttttcagaacgggtagaaatacattttgcttttcttgacaaaaacacatctgtatgttatcatgatagcacgttagtagagtaaagagaacgaatcgtgaaaacgtaagatggaggcatttatgaaaaagggtttagctttatgcatggctgcagtattagccatgggatgtttgttaacaggctgtggaagcagtgatacaggcgcgaagtcaacaacagaaagtgctgcggcaagcacggagaaagtgggaacggaaactgccggaaccgaggcagccggtactgagacggccggtaatggcaagacatttaccgttggctttgatgccagcttcccgccatatggttatcaggagaatggcgagtatgtcggttttgacctggatctggcgcaggaagtctgtgacagaaatggttgggaacttgtgaagacaccaatcgactgggatgccaagaatatcgaattaaatggaggttccattgactgtatttggaacggctttacgatgaatggccgtgaagatgattatacatggacaccggcttatatcaacaatacacaggtatttgcagtgaacaagaacagcggcatcaaaaaggcagctgatcttgcaggcaagaatgtccttgttcaggcggattcttcagcactggcagcgcttcaggatgaagaaaacacagatatcaaggctttggcagattctttcggcagcctgacacaggtaccggattatgagagcgcgctgatggagcttgaagcaggttccgcagatgccgttgccatggatgaaggtgttgcgctgacgaagcaggcccagaatgacaatattgtgatccttgatgatgtgatttcacaggaacagtatggcattgcttttaagaaaggcaatgatgaattgagagatcaggtatggtctacattacttgaaatggagaaagacggcactgtagataagattgcagcgaagtatccatccatcaatacagccaatatctgtattagtgacaatgaataagaattgaatagagcatcttggctgctgcaaaattcatcaattgattttgtggcagttcttttgcttttataaaggaggaaatgagaatgacggtcatgcagattgtccaacagttatttggcagtatgggtatcacgatggaaatcttttttgttacactgattacatcgctgattctcggccttggtctggccctgattcgtatgtcaaagaatccgatattgtcagtgattgccaaattatatatttctgtcatgcgtggtacaccattgatgctgcagctgcttgttgtatattttggccctttttttattttcgggatgcagatcacgccatcttaccgcctgaaagctgtcctgatcggctttgctttaaattatgccgcttattttgcagagatttacagatccggcattgcagcgattccggttggtcagtatgaggcggccagaatgctgggatacagcaaaacacagacatttgcctatattgtgatgcctcaggtcatcaagcggattattccgccggtagccaatgaaaccattaccctggtcaaggatacatctctggcttttacattggcggtagcagaagtatttaccgtgacgaaacagttggtggcttcccagtcatctgttgttccgtttattgtggcgggtattttttattacattttcaatctgattgtggcggtattttttgattatcttgaaaagaaaatggattattacagataggaggagagcccatgcgtttactggaaatgaaccatattaagaaaagctttgatgggcaggaagtcctgaaagatatatctattcatgtggatgaaggtgaagttttgagtattatcgggccctccggttccggtaagtctaccatgctgcggtgcgcgacgatgcttgagaccattgatgacggagagattatttatcttggggataaggcggctttcagcaaggacggacatgcagtgtatgccaaggcggcggatttgaagaagatccatagttactatggacttgttttccagaatttcaatctgtttccgcattattccgtcataaaaaatattacggatgctccattgagagtgcagaaaagaaataaatccgaagtttatgcagaggcaagagaacttttgaagaaaatgggccttgaggacaaggagaatgcctatccttatcagctgtccggcggtcagcagcagagagtatctattgcaagagcactggcaatgaaaccgaagattttgttcttcgatgaaccgacatctgcgctggatccggagctgacaggtgagatcctgaagattattaagaatctggcagcagaaaagatgacaatggtcattgttacccatgagatgaatttcgccaaaaatgtgtcggattatgtggttttcatggacaagggtgtgatcgttgaggaaggcaaaccggaagatgtgtttaattcagaaaatcctcgaatgaaggaattccttggcaaatttgaatcataaatcaaaaatagcgtaaaaaaaaggttttttttcggcgtattcagtggtatgatagtcaatgctgatcaagtcgtgtgtgtgtccggcttgaaataacagttgcagaaaggatttgtaagacgatgttattttgcagtatagaattcatatttctgtttatgccgatttttttgttgatttattatactgttccggaaaaatatggcaacctgatactgtttttgggaagcctgtttttttatgcctatggtgaacatcggtttttctggctgattcttgtttcgctggtgatccattacgtattgaccaggtattcccagggaaaaagccggaaatgtcagaggatttgtctggtggtcatgcttatgtatggctttggcatgctgtttatatttaaatatatggatttttttgtagccaactggaatcatctggccgtctggctggcggacaggggaagcagtgtgaagctgccccatgtgaatgcaccggaggtatcgctgcctttaggcatcagtttctatactttccagattgcagcttatgccattgatgtttacagaggtcaggtgaagccggaggaacgttttgttgatctgggcgcttttctgagtatgtttcctcagttgatcgccggtccgattgtattgtatcatgatgtgtcagcgcagctgaaaaagcgtgttttgagctggcgccatatggaaaatggcattaagacctttattattggtctgagtctgaagatgctgttggcgaatacctttgggattttgtggaatcaggttcagacggcaggtgtcagtgcagcgtctgttccgatggtctggctgggagcactgggatatacctttcagatttattttgacttccagggctattctatgatggctatggggcttggagaaatgctgggatttcgaattcccagaaactttcggcatccgtatatggcgacttctgttacagatttctggcgtcgctggcatatgactctcagcggatggtttaagaattatgtctatattcctctcggcggcagccgtcacggcaaagtcagaatgctgttcaatatgtttgtggtctggtctttgaccgggttatggcatggcgccggatggaactttattctgtggggcatgtattattttgccctgttgatgatagaaaagctgtttttgctgagattttttgagaaatatcctgttgtcggatggtgtttcacatttccggcagtggtgaccggatgggtaatttttgcatcggataatctgagtgcagtcaaaacctatctgatgcagatgttcggacatttgagtgatgccggttactggacaatgaatctggatctgtttgggcagactgtacggcagtatggtatttatctggtgttggcctttatcttttcgacggcgtggccttatgggaaataccgtgagaataagaacaggccgctgacaattttgattctccttgtcctgtttggtctgtgtgtctataagatgcagacagcagccagcaatccgtttttatatttcagattttaggaggtgcagaggatgcgtggatggatcgattgggccagaaagtacccgatgacgatgcttttgatcatctgttgccttattggcggcccttactttggcggacagcgtgcgatcgaggcctataagaattatacagggaaggcaacggcggcggatgtccttggtacatggacccagaaggcagcagagcattcgacactgctgaaagcggatgcccagggaacgaaggaacagcaggccgccaaaaaaggcggaccgtttacggatgtggatcagagttatctggatgatgcggtgtttatcggtgattccagaacggatacattgaaaatgtatgcgggatgggagaatacgacgtactatgttaagactggaactaacatctgggatatcatggatgtggtgccggatgatgaagacaggaccattgatgaggaacttcagaataaacagttcggcaaagtttatatcatgttgggagtgaatgaactgggaaccggtacagcggaaacctattaccagcagttcaaaaaggttgtggtgcgtatcagggaacttcagccgaatgcgttgatcttcgtggagtctattattcatgtatccgccgagaaggatgcagagggtacagtgatcaacaatacagaaatcaacgcccgcaataagtggcttaaaaagctggcggacaacaagacgattttttatctggattacaatgaagttctggatgatgagaacggtgcattaaaagccgattccacctttgatggtgttcatttgcaggcggataagattgagccgtggaagcaatttatcctgagtcacggcgtgaaatagggcggccgctgaataatgaaatgattgcggtcataagtattaatattgggatttcaaaagagcacctgtgtctgaagctgctcttttggaatcccatttttagtttttgaaccgcaatcgatttattatttaatgcggccgctttccctatggcaatcttatataaaatctgctaaaataaagtatatggaaaatcattttcatgagatgacttgatttatggatattcagaaaatagcaaaacgcttgttattcttggataaacatctaaattaacagttcgcagcaggtggttcaacatcgccggtccttaggcgctgttttttagcgccttagtaccgttgcagatgttgtgcagcggaaacgtacctgcggtgaactgttaatttagatgttttcgaagaacaaggaagcattttgcaccatctgaatttactgaaagggggatttttatgggattaaagacggttgttttgaattcagagaggatgaattacgatggcaagctggatctgtccgttttatcatctgaggtcaaggaatatgcttctacagagcaggatcagattcttgaacgtgtgcaggggatggatgttgttgtgacgaaggagatgcccgttgacggcgatacaattgcccgttttccggattctgttcagttgatctgtgaggccggaacaggatacaacaatatcgatattgaagctgcaagggccagaggtattacggtatgcaatattccggcttacagcacagaacgtgtggcccatacagcgattatgatgattctgaatctcagttcctccatgcagatccagcaggcaatgctggccaggggagaccgaagcaattttacaaaatgtatgcaggtcagccatgtggaagtcaatggcaaggttctgggtgttgtgggagccggaactattggacgtgaagtgatcaaggtggcacaggcccttggcatgaaagtacttgcttatacaaggacaccgagagccgatgaggataatcttaagtacgtctccttggaagaattgctgaaacagagtgattatatcagtctgcattgtccgctgacaccgcagacaagacatatgatcaacaaagagaccattgccatgatgaaaccgacagcttacattattaataccggacgcggtgcccttattgatgaaccggcgctgatcgaagcgctgaaagaggggagaattgccggtgcaggtctggatgtacaggagacagagccgccggtacaggataatccgctttatgatatgccgaatgttattctgacgccgcatatgggctggaagggccttgagacgcgtcagagactggtgtctatcctggctgccaatattcaggcgtttgacgagggcagacctcagaatgtggtcagctaagcttcattttggcttacatttagctaaagagcagattctttaaatgaaaaggtttgatttcctgcatatttgtgatagaatagcttatgttcgatttgagtaggatgggtattatagtagaattgcagaggtgcaggaaagatgatgaattatattattgtatttttaatttcaatggtgccgctgattgaactccgcggctccattctttatgccaccggaataggacttccgtttttgccggcctatatcacagccattatcggcaatatgctgccggtcccttttatctttctgtttgcgagaaagatactggtctggggagctgataagccggtcatcggcagatttttcagtttttgccttgagaaaggcgagaagggcggcaagaagcttcaggcgaaggcaggcagaggtttgtttgtggcgcttttattattcgtgggcattccgcttccgggaacaggtgcctggacgggaactctggcagccagtcttctggatatggatttcaagtccagtgtggtggctgttatgtgcggtgtactcctggcaggtattatcatgggagctgcaagtgcgggactttttggcgcgcttggcgcattgattggctagaaacctacaaggaagcctttgaaatatgctggggtcggataagacgcatgactgccgggcagacatgtattttatgccggagaggcctgatttagaatgagagagaggaaagagctaatgataaacatgttgtttaatggtgtgccggcgaatataatggcactggccggtctggtatttgcttttataatgacctgtctgctccttgtcaagtgcaatgatagactgccgaaggatcagggaagagagttcgctgtgaacggtgccctgtctgcgggaaagccgagaggtgcaggatttatatttatccttgtatttatcgtatcagttgttttattctgcgagctgaatacagagattattatttaccttgtattattggcagctgcaatgatgacaggatttctggacgattgttccagagccccttggggagaactcaagaaagggcttctggatttcgccattgcagtcatggttgccattacatttttgaactttaacagcaacgttgtagagtttgcaatcttcggcggcagtatcacgatccctccggtgatcttcggtattctgaccgttgttcttgtatgggtatccatcaatgtgacaaactgcagtgatggtgtggatggtctgtccggtacgctgacgatcatcacattgatcagtttgtatatggtggatcagatcaagggaatggatccggtcttctcccatacgattttgctgtttgtcatctgtattctggcttatctctggtttaatgcaacaccgagtaagctgatgatgggcgatgcaggttcaagagccatgggctttttcatcagtattgcagccctgaagacgggaagcccatttatttatatccctgtagcgattgtactgattctggacggcggtctcggtcttctgaaggtatcgttgcttcgcttcctgaagatcaagattcttgtgaatacaagaacaccgctgcatgatcatgtccgtaaggtgatgggatggtccaacacacaggctgtgttcagatttgccatcattcagatcatgatttcagcagcagttatttatctgatcatgtaatagaatagcgtttattatataaaaggccagttccgttgaatgacgggactggtcttttagactatctgtatttaatgtttaattttgcattttgcgcaggcacttggggataatgcacatccgccaagggccgtttcgcgcagttcagcaggcagtttttttccgacggtatacatgatatccatcatttcatccagcgggatcagctggtgaatacctgcaagggaaatttcagcggccacaatggcgttggatgcaccggatgcatttcggttctggcatggatattctaccaggccacccaccgggtcgcagacaagacccaacatgttcataagtactgttgaggcggcatctgtacattgttccggtgttccgcccatcaactcgacaacagcggcagcggccattgcggcagcaacgccgatttcggcctgacatccgccgacggcaccggcaacggttgcattgagcatggcaagatagccaatggcagaacaggtgaagagtgcgtcgatgatctggtcatcggtgaaatcatattcttcctgaagtgccagaaggacacctggaataacaccggatgagccggctgtcggtgcggcaacgatgagccccatggaagcattgacttccagcacacccatagagtaggcaatcgctttggaaatcagattgccggcaatatttttcccggaggactgcaagtcagacagttttctgctttcaccgccaatcagaccgcccatggactgggaaggctggttgatggcttctttggtggcatccttcatgatttgaagggagacagccattctggatctgatttcatccagaggcttttctgtcatctcacattcacgatccatcatgatctgagagatgggtttgtcatattctttgcagagagataataactctgcagcttttttaaaatccatgttgtgttcctcccggattatggttcgataatcataacgtcgtgtacataatgattgtcagagatcatttccttaatacccttcggaaggtctccgtcgacttcaacaagggtgtaggccgtctgacctttggattcgcggaacagacgcatgaaggcaatgttgactccgaaatggctgagaacggcagtgatatgcgcaacaagacctaactgatcctggtgtactacaataacggaactgtattcaccggtgaattcaacttcaacattgttgatcctggaaatacgtactttgccgccgccaagggattcaccacggataagcatggttgttccggcttcattttccatcaggatatccacagagtttgggtgaatatcggtgacggtgtcattcggtataaaatgatattcaatgccgcgttcggatgcgattcggaaagaatcccggatacgtttgtcatctgtatggaaaccaagtaacccgcctaaaagcgcgcggtctgtaccgtggccggaataggtatgggcaaaggaaccatacagcgtaaatgttgcttttataatagggccgttgatcatcttctgggcgagataagcaatcacggctgcgcccgctgtatgtgagcttgaagggccgatcatattagggcctaatacatcaaatgcgctgagttgtgccatagttatctccaatctgctgtaaataataggatgttgtgttagacttcttcgtcaaatgttttgcctaagtaagtcatatctacaaaagtaccacaaatgtagagtggaagtaaagggataaaatattatttttgtcgttgagctctgattttgtacaggataacatacaatgttaaatgaatcagatttatgaattcgataaaaataatatctgtcacttctctaattcgatacacggttataatgtggaaattctgcgacaacccatatgtagcatagtgtagttggaaattgtaatatattgccataggacttgaattatattcgattataaaacatgcattaaagtcatataataattgtattatatttcaaaaggcggagagcatgtgaaattgacgattggcaaaagagtaaaagaactgagagtgaagaataaaatgacgcaggagcagttggcggaagctgtagatgcctgtgttggatatataagcaagattgagaataacagagtgaataatatcagcctgtcattggcatgtgagctggcatctgtactgaatgtttcattgggatatctggttggtgaatccacagagaatgaaatgatggatgaagagatgctgagaaaatatggtgcgtgtacggcagatgagaagagaaagctgttaaagattgtagatattttaagggatgaggattagtcccgggatacgtgcttttggctgaataaaacgagaaatctgatagcaggcaatacagatttggagaaccggatgcagtcgatactgaaaagaaaagcggcagttcctgaaatacaaagtgtagatcaggctgtcgctttttttgcgttctgaatcaaatgatgttggggtcaagaggtcaaatagacaatttcatatcgccgcttttgatccagtttttcttgcgcatggcttctgagaagaccagggtaagaagaccgggaagaataaaatgaaacagaaaaatcttgatcaggacgagaaccggactttcaacggccgtcattgtctgccatgtcataatctgtcctaccaggccggatgtacccataccgcttccggtggcattattggtcatgccaacaaaacggctgatggcaattggacccagaatagctgatgagagaatttcagggatccagatctggggatggcggatgatattcggtacctgaagcatggaagtgccgataccctgtgcaagcaggccgccaacgccgttttcacggaagctggcaacagcgaagccgatcatctggcagcagcatccgatggtggcggcaccggcagcaggacctgagagaccgaggatgatgccaagggcagcagaactgatgggaagggtgagtaccatacccatgatgacagacacgacaatgcccatgatcagaggctgctgaaccgtgccccaattgatgatatcaccaaggcgtgtcatgatcgttgacacaggcggaccgacgataatgcccactgcaccgcccgcgataatggtgacagcaggggtgatcaataagtccagtttggttttgccggcagggagagaaccaacagcaatgcctgcaagagcagcaatgaaagctgacagaggatcgccgggaccgctgtagaccagggcaccatcagaaagaatggaaccggagataatcgcagttgcataagcgccgatcatacctgcggcagcggcagataatgtgacataagtcgaggatttatacttgtaggcgacaccgataccgatgccggcgccggtgagacgctgggccataacggcaaaaacacccagataataaccgaaatcgccgccgatcagatcagcggcctgtttgaggattgtgccgataatcagggtggaaaacaggccgagggccatgccgctcagaccgtcaataaaaatcaaatttaaaaacttcttaattgttgacatagaaaaactccctgtatacacatgtgtcttgtcagtctttgccaaataaaaaggttgaccttatgcgcgaacaaggtaacctttttcacgaagtgcacattcgatattgtccaacatgacttcggatcgggcttcaactgtgtgataatgggtgccgcctgcgatgatattcagcggtttggcattggaatgcttcaaacggtcacagaattctgccacatcccgacgattctccagaatgagattggctgtgatttgcccgtaaatctcatgttcaatgatgacatcaagcaccttgccgccgttgtcaacaatggtattcaattcatctgcaatggcatcatcgctgtggttgacacagtaaatctggtgacaggcttccgtctgctgactgtacagaacatatcccttcgttgtggcgagaatatccttattcactgcacgcagcagcgcaatatcctgaacaataacctgacggctgacaccaagtgaacgggccagggcacttcccgagataggagctgtgctgtccctcagcatctgcagaagctgttcgcgccttgcttcaccttcctgcatgtaaatcctccttcctgtatatgtactgcccggacaaacatcagcatctgcatgcatctgatctatatgaatccaatctgcaagcatcaggaagaaatgcctgtgggcaaaatccttatgactaatatgataactttaaaatcatattttgtaaaggaaaaagatatgatataatggggaagaggtgaataataaaatgagatactataatcagacaaactatccccatgttccatatccgacactgacagatcttcctgaactgggacgttcagatacaaccgtcagagatgcgggctgtggcctctgtgcttcatgtatggttgttgagaatatgacaggcagggaattcccattgatcgactgtctggaactttccatcaatgtcaatgccaaccacagtccgggcacagacttaaccgtccttggaccgtatattgcagaacgctttgacctggatcttgtgatcacagatgatcctgagcttctgagagcgcatctgaagaaaggctatatggccgttgcatgctctgcaggggacagaccggaagaagattatatcggtgtattctcacatggcgggcactttatcgctgttgtgggtatcgaagaagacggcgagcatatcacagtccttgacccgtcattaatgccggataaatatcaggaagacggccgtcgtgacaaggtcattgtcaacggcaacgtccttcatacaaccatgaaggttctggcagaagactgtcgttacagagaaatcaaatactatgcagacggcgacttcaagaaatggctggagcaggaagaaccggatgccaacaaagaccgttacttccttttcagccctaaagcatccgagagcagataaaccgaatcaatatcatcaattttggagaatgatatgtacaaaactctgcaggggcagtatccggttatctttctcacacgccggataaaagaatagccagggaataaaaataatcgtccacgggcaggtgcttctgcctgtggacgattatttttattcccttcaaggactattgagtattcacaaacaattttacttatagaatgccacgaaagcgttgtaggcttcgtaaacatccatcttggatacgatttccattggtgcgtgcatggacataaccggtacacccaggtcaaccacatcgatgttcatacctgcgatgaactgtgccactgtaccgccgccgccttcatcgactttgccaagttctccggcctgccaataaacattgttggcttccatgataccgatgactttggacatggtttctgcactggcatcactggagccgctcttgcctcttgcacctgtgtacttggtcaggacacagcctttgccaaggtagcaggagttgcctgcttcatagacatcagggaatgtcgggtcaaaggcagcactgacatctgaggacaggcacagtgcgtgctggatcatgtctttataagaaacacctgcgttttcagccagatattccagataatggcgaacataatcggaatgaaggcccgtattgccgacggaaccgatttcttccttgtcggtgaggatggttacagttgtatatgtaggatgcagtgtatccaactctgcacggagtgccggataagcacatacacggtcatcatgagcggcagatgcgatcaggcttctgtcaaaaccaacatcacgggcagggcctgcggcaacaatttcaagttcggcacgatagaaatctgcttcaacaataccgtatttctcattcaggatctgaagaacttttaacttcacagggtcctttaagcctttctcaggataaggaatggaaccgatgagaatattcagttcttcacctttaataccttcagccagggaacgctgattctgtcttgctgccagatgcggcagcagatcgctgatatagaaaacaggatcggcaggatcttcaccgatattcacagtaacggcatcgccgtttttcttgtagatcacaccgtgaagagaaagaggaattgttgcccactggtatttgcggataccgccgtaataatgggtcttgaagtaagcaatatcattcttctcataaacaggtgttggttttaaatccagtctcggtgcatcgatatgagcggcattcagacgaacaccttcatctaaaggtgcagtaccgaaggtagaagcgataatcgctttgccgcggttgttgaaataaaccttatctccgggctggtaggaagccttcgggtcgaattctgtgtagccggcatcttttaacattgcttcggcttttgccacacattcacgttctgtcttggcttcggataaaaatgctttgtaaggttcgcagaaatcataagcttctttgacacgttccggtgcttccagggcaacagaagggaacttccatgtcagttcttcctggagcttctgtccggcagtcttttcatttgtgttttccattgtaaaaatctccttagtttattataataattcgccgatatagtccgtcgtcatgcgaacggcctggtcgataaaggcctgaagcggcccgttggacagcatggcaatacgggtattgcagctgtcgaaaggaatcagaatccgtcgggcattgctggccccgatagcctgagccatagtcggtgttaattcgccaagaatggcattggcaacaacaatagcaacaacgcccacgataatatcggagcgtcctgcattgaggacgatggcgttctcgcctgtggcaccatcattcgcaccgcctttgagcatgttggaggtggccagggagttggtccccagtgcacggatggtgacaggcagatcctttggaaggacagaggtaagggcagaaatgtattgtctgccgatgccgccgccttgaccgtcgatcacactgattaatatatttttcttttgcatgtttcttcctttccggttaaaatcactgttcttagtatagcttaaaaagggaaaaaaagcaatgatgccgacgttaatccagaatatcgcttgtcattttctgatgggttttctgatagaaagtcacttgattatgcatgtcgcaggtagccagcaaaacttccctcagattagaaatattctgggcatgcatctgtttattcagccactggatatctttgccggcgtgctgcagatttttctccataatgtgaccgtcaatgatcacattagctacaaggaattcctgttcaggagtcatagacatatcttcgggaatgacgggacgtttgtcggattttggaaggaaactcatacggccattgggttccagtatgattgtctgcagatccgacaaattaaaatagccgttgactcggcattgcagcagcatttcggatagatctattttcccttttaggagattcttttcatagactgtgtcatggtccatcagaatcaaaggtttgccggagatgactcgacgggcggccatggatttgacggagatataggaaaggacaatggcagccagggcataaacgatcatggcggtcagaggcagccaccagtctttttcaagtgaggtggccatttcagcggcaatagagccaatagtgatgccgttgatataatcaaacatgctcatttcagacatttgccggtagcccatgagtttggtgaggatgaaaagggcaatcagggagaaaagtgagagaagaatgacgtttaagatatccataagaaaacctccaaaaaattttaaccatcatctaaaaatagaaaatcatttgcttgattatacgtgaatttaacaatggcattaataatatgtgtgtgtgcaggaaaaactatgcagttgctttatagtgatgctcgtttatatcaccaatggggatgacatcgggcagcacaaatgattacttaatgacatcgtatttaaaagattttgcaaaaatacaccggaacagttgcaagaggactggatttaagtgtataataaattaaatttgagcagatattcatgcaaattgctttgggaaatcttgcaaagcaaggacaggaggttctatgattacattacttcaaaacggtgcctggctgttaaacggacaggaaattgttgaagatactgctgatagtacggcaattcttaattcgaagctcggttatgtaccagagaaaaaagatgcagcaacgcagacaatggcttacaatattttgcaggcacataatacttctgattcaaaagagcatttgaagatcaagttcgacaagatgacatcccatgatatcacgtttgtcggcattattcagactgcaagggcaagcggacttgagaaattcccgattccgtatgtactgacgaactgccacaacagtctttgtgcagtcggcggcacgatcaatgaagatgaccatatgtttggacttacatgtgcccagaaatacggcggcatttatgtaccgccacatcaggcagtcatccatcagtttgcccgtgaaatgctggcaacctgcggcggcatgattctggggtctgacagtcatacacgttacggtgcccttggtacaatggctatcggtgaaggcggcggcgaattggccaaacagctgctttgcagaacgtatgatatcaatatgcctggggtagtcggcatttatctgacgggcgaaccgatgaagggtgtaggtcctcaggacgtggcattggcgattatcggtgaagtatttgccaacggttatgtgaacaacaaagtcatggaattcgtaggaccaggtgtttccaatctgagtgcagaattccgtatcggtatcgatgttatgacaacagagacaacctgtctgtcttctatctggcgtacagatgacaagattgaagaattttacgcattgcataacagaccggaagattacaaagaattgaatcctggaaaagttgcttactatgatggtatggttgtggttgatctcagcgccatcaaaccaatgattgcaatgccgttccatccaagcaatacatatacaattgaggagttgaacgccaatcttgaagatattctggatgatgtggcaaaacgtgcagcagtcagctttgacggtgccgttgattacacattgaaggacaagattgttgacggcaagttatactgtgaccagggtattatcgcaggatgtgccggcggcggattcgagaacatctgcgatgcagcggatattatgagaggccgcagcatcggttcagacaagtttaccatgaatgtttatcctgcaagtacaccaatttatatggaactgctgagaaacggcgtggcagctgatctgcttgcaacaggtaccgttctgaagacagctttctgcggtccttgctttggtgctggtgatacaccggcgaataatgctttcagtatccgtcacacaacacgtaacttcccgaaccgtgaaggctccaagcttcagaatggccaggtagcttctgttgcactgatggatgcccgttctatcgcagcaacagcagctaataaaggattcctgacacctgccaccgatctggcagatattgaatacaagcatccaaaatatcattttgataagacgatttatgacaacagagtttatgacagcaagggtgtggctcatcctgaagtggagatccattttggaccaaacatcaaggactggcctgcaatgaccgctttgacagatgatctgatcgttaaggttgtatccgaaatccatgatccggttacaacaaccgatgaattgattccatccggtgaaacatcttccttcagatccaacccgcttggtctggctgaatttacattatcaagaaaagatcctgcttatgtgggtcgtgcgaaggctgttcgtgcacttgaagaggcaagacaggccggcggatgcccatgttcaggcggtacagaactgtctgatgaagtcaaagcagttattgagaatatcaagaaagcattcccggatatggatgcgaagaaaacagctgtaggcagtacgatttatgcggtgaagccgggggatggttctgcccgtgaacaggctgcttcatgtcagaaggtacttggcggatgggccaatattgctaaaggctatgcaacaaagcgttatcgttccaacctgatcaactggggcatgctgccatttatctatcctgaagatgagctgccgtttgccaacgatgactatattttcattcctggcattagaaaggcgattgaggataagctgacagatattcctgcttatgttgtgggcgaagagatgaaaccgattacattgaagatgggtgaactgacagatgatgaacgcaagatcattcttgcaggttgtctgatcaactactataaagaggcttaagagactgagtaagtcaatgctactatattgagacaggccggcggtagcttttgccgctgtcggtctgaacttcacatattacgggaggacatgacgatggacaagattaaaatgacaacaccgttggttgagatggacggcgatgagatgacaagaattctctggaagatgatcaaagacgaactgcttcttccatttattgatctgaagacagaatattatgatctggggctggagtacagagatcagaccaacgatcaggtaaccattgattctgccatggcaacaaagaaatacggtgttgctgtcaaatgtgcaacaatcacaccgaacgctgctcgtgtgaaagaatacaatctgaaagaaatgtggaagagcccgaacggtacgatccgtgccattcttgatggtactgttttccgtgcgccaatcgttgtgaaaggtattgaaccaacagtcagaacatggaagaaaccaattactattgccagacatgcatatggtgatgtttataaggcaacagagatgaagattcctgcagcaggcaaggcggaacttgtttataccaatgaagccggtgaagagacacgtgaactgattcatcagtttgatggaccgggcattattcaggggcagcacaacatctgcgcttccatcgaaagctttgccaaagcatgctttaattatgcactggacacccatcaggatctctggtttgcaacaaaagataccatttccaagaaatatgaccatacattcaaagatattttccaggaaatctttgatgcagaatacaaagagaaatttgatgcagcaggcattgaatacttctatacactgatcgatgatgcagttgcccgtgtcattcgttcagagggcggttatatctgggcttgcaagaactatgatggcgatgttatgagcgatatggtagctacagcttttggttctctggcgatgatgacatctgttctggttgcaccggatggcacttatgagtatgaagctgctcatggtactgttcagagacattattataaatacctgaagggcgaagaaacatctacaaactctgtagcaaccatttttgcatggaccggcgctctgagaaaacgtggtgaactggataatattcctgaactgatggcttttgccgacaagttggagaaagcaaccatcgatacgattgagaatggtacaatgaccaaagacctggcactgatcacaaccatgaaagatgtgacagttgccaacagtgaagaattcattaaagccatcagaaagacgctggaagcagcattataatagacgctttattgaaaatcgaacaaaaggcagcctgccatctttgatattaatgaagtcggcgggaaagtcttaaataaaggagagacaaatgggaatcgaagaaaacgaagaaatggacgaatttgatacagtgacacttgagatggaagatggcagcgaagtagaatttgccatcttggatgaattcgagatggagactgaaaaattcgttttactcggtgaaatcgaaggagacaatatcaacacagatccggatggcatgctgtttatgaaagcaatcatggatgaatcctgtgaagaagatgaagtcattctgaacgtcatcgaggatcctgaaaaatacagcgcagttgttgacttttatgctgaactggattaattaaatcaatagttgtatgagcgaaatatcctggcaggacaggctttgagcttgaatgtcaggatatttttgtttgatttcttttggaatattttgtataattataaaccgtacaatattttatatcccagtggaatgataaggaatgatacgtccactgagtttttgacttgcataatctaactaggagaagcattatggcagagaatacaaagaaacaggatttggcaacgggtgctgaattgacattagaagagaagattaataagatcaagtctcgtgagattacagaggctgagaagaatatgctgactttacctgcttttgaggcagcttgtgaggcagtgaagaaagtgacacaggaaacaggtctgatttacagcaaatatttcagtgatcacacaggcaataagatatattttaaaccagagaatatgcagctgacaggtgcctacaagctgagaggcgcttattacacaatcggtacgcttacagaggaagagagacagagaggtctgattacggcatctgccggcaatcatgcacagggggttgcctatgcggcgcagtgttatggtgtaaaggctgttatcgtcatgccgacgaccacaccgctgatcaaggtagagcgtacaaaggcttatggtgcagaagtggttctttacggtgatgtttatgatcaggcatgtgagaaagcttatgaactggcagcagagcatggttatacatttattcatccatttgatgatctgcgcgtagcaacaggacagggaacaatcgctatggaagtgattcaggatttgccactggtagattatattcttgttccaattggcggcggtggtctggcaacaggcgtatccacactggccaagatgctgaagaacaatatcaaagtcatcggtgttgagccatccggtgcagcttgtatgaaagcatcccttgagaatggcaaagtgacaacggtttcaccggtcaatactatcgcagatggtacagcggttcagacaccgggtaccaagattttcccatatatccagaagaacctggatggcattatcacagtggatgatgaagaactggttgttgccttcctcgatatggttgagaatcataagatgattgttgagaactcaggccttttgactgttgcagcgctgaagcatttagatgtgaagggcaagaaagtcgtttctattttgagcggcggcaacatggatgttatcaccatgtcatctgttgtccagaatggtcttattgcaagggacagaatctttaccatctctgttcttctgccggataagccgggtgaactggtccgcgtatcacaggttatcgctgacaagcgcggtaatgtgatcaagctggatcataatcagttctttagcactaacagaagtgcagcagtggaactgaagatcacactggaagcctttggtacagagcataagaaagagattatacaggcattggaagaagccggttataagccaaaacagattcgtccgaacttataaaatacagaataggatttaaacatatgaaacggggagcaaatgataagtatcatttgttccccatttatctattggactgaaaatttaaagggcctgttttatttcagcaaaattgatgtaaagctgttcatacaggttcaccttgatggtatcatcgaaaatataaggaatatttaactgtattttaatataattaattttcaggtatttgtcaatggcaaagaaagtattgcgtattctatgagagatgacctataatagatgagtgatattcgcaaagcgcttactgaattggggactgaccgataagcgagtgatggatgaagaagagataaacagaaaagacataatggctgaaaatgtataagtcatagaatagaaatgtcgaaatgaactgagggatagagaatgaagattgtgttggctgcgatcaatgccaagtatattcatgccaacctggcagtgtgcagtctgcgggctttttcggatgaatataaagaacagattcagatcaaagaatatacgatcaatcagtatacagaagatatactggcagatctttacaaggagaaagcggatatggttgctttttcctgttatatatggaatatgggaatggtggaggaactgacggaacttttgcatcagataaggccggatatgccgatctggttcggtggtccggaggtatcttatgatgctgcggaatgtctggagcgaaatccgggagtgaccggcgttattcgtggtgaaggagaagagacatttcatgaattgatgcagtactatattgacggtagtggaaagcttgaggacattcgggggattgtttaccgtgaaaacggacaattggtggataacggctggcgtgaagtcatggatctgaacaaggtaccttttgtctatgaagatatgaatgatttcaagaataagattatttattatgaaacaagcagaggatgcccattttcatgcagttattgtctgtcttccgtggacaagaaggtgcgtttaagagatatgtcccttgtggaaaaggaactgcagtttttcattgatcatgaggtgccgcaggtcaaatttgtggacagaacttttaactgcaataagaaacacgctatggctatctggcgttatatcaaagcccatgacaacggtataacgaatttccactttgaaatcggtgcggatctgctggatgatgaggagctggctattctgtcagatatgcgtccgggattggttcagctggaaatcggtgtccagtccaccaatgacgcgacgattcaggaggtttccaggaccatgcggctggatcgcctggcaaaggctgtgcataccgtgaatgtcgggcataatattcatcagcacctggatctgatcgccggactgccatatgaagattatgacagattcagacagtcttttaatgatgtgtatcagatggagccggaacagctgcagttgggctttttaaaggtattaaaaggttccaggatgtatgatatggctgaaacatatggcattgtttatcgaaaaaaggcgccgtatgaggtgctgaaaacagactggatgagttatgatgatattctgaagttaaaaggtgtggaagaaatggtggagatttattacaacagccatcagtttgagcagtctgtgacatatcttatgcatttttatgaggcaccttttgatttctttgaagatctggcagcgttttacgagcagtgcggatttggcaaagtacagcatggcagaatgcagcgatatgatattttgctgcagtttgcagagaaacggcatctggggaaagtggtcaatgatatggccgcagctgataaaaagaaggatattcaagaggtacacggtgatgccatagaaattctgaaagccaccatgctttacgatctctatgccagagagaatcttaagtcgcggccggaatgggcacatgagattctttatcgtccgctgtgtgaagatttttacaggaatcgggaaatgacagaaaggtatctgccatcctatgagggatgcacggcccgccagatgaagcgaatgacccatatggaaggatttgccatggatatccgggcaacggcggcatccgggcaatggacaggaaaaccggaagtactgctgtttgattataaagagagaaatccattaacgtatgcagcaaagatgacggcaatttctgtgtcggaatgcaatgctgaaatggaggaaacagcaaatggttaaagattatgtggtatttgacctggagacgacaggactgtctccggataaagacacgatcatagaaatcggcgccctgaaggtcattcaggggaaagtggcagaccgtttttcggagtttattaatcctcatcagaagctgacgcagcagatttccgaattgaccggcattacggatgacatgctggccggggcgagaaatctgcaggtggttgtgggagattttgtcgatttttgcgaagattatgtggttgtcggtcataatctggggtttgattatcgttttaccaaaatggctgccgaaaagtaccatctgccttttgagcatgagggtattgatactttaaagattgctaaaactgtacataaggatctgccgtcgagaagtctgggcgcattgtgtgaacattacggtattatcaacagttccgcacatcgtgcttaccatgatgcactggcgacggctaaattgtatcagacgctggcccattattttgaaacatcggagccgaagctttttgtaccggagaagatgggctttaaggcaaaaaagcagcagcccatgacaaaaaaacaaaaagcctacttgaaggatttatgtaaatatcataaaatagagtttaacgatgcaatggagcagatgacaatgagtgaagcgtcccgttggattgataaaacgattcttcagtatggacgcatgaagcgttttaataggagtgatagaaatgaataaaaagacaacaaagattatttcaacgattattgttgcattgattgtaatttccatggttctgagcatggttatccagttcgtttagaatgtgcagttattcaaacagggcgttgaataacatgagatgtattgaaaccgaagactgacaggatagagagagcctgtgggggacatatgatgaaaaaagcttggaaaggaatactgggactgttaatggcaatgacgttcacagtgtcagccggcagaatggtttatgctgagacggttgatgaaaatcatgaagtgccggatggggtcactgtcaatggtatggaacttggcggcctgacggtgaaggcggcagaagataagctgcagcagtatatggatgaagtttgcggcggttccgtgacattaactgtttcaggggaagatgtcacttttgcctacaaggattttgatatgcatgcggcggacagtacagttgtgcaggatatatgtcagatcggcacaaagggcaatttgatcaggcgctacaaagagctgtcagatgtgaagaataataaagctgaatttacattgaagtttgaatatgatcataacaaactgaagaaagttatcagtgagaagacagagacgtataataaagaggctgagaatgcgtcactggtgcgccattccggtgagtttatcattacagatgatgtaacaggggtgaaagtggatacagatgccacaacagctgaagttgaaaaggcgttaggcgatggctgggacggatccagtcagaaactggatgctgtggttgaagagacgaaagcggctcatacaagtgatgagctgaaacaggtgacagatcttctcggcggttattcaacagattattcgtcatccagcagcaatcgtattgccaatattgccaacggtgcatcgctggtcgatgagacggtcgtctatcctggggatacattttcttttttgaatcatgtaacaccttttacagcggcgaatggctattatcaggccaccggctattcaggcggtcgggtagtaccaagtaccggcggcggtatctgccaggtttcatccacgatgtataatgccgttttgagagcggaactggaagtggttgagcgttccaatcatggtctgactgttggatatgtgccccttggcgcagatgccacggttgcggagggcggtgtggatttcagattcagaaataatctggatgcaccggtttatattgaagcctatacgtacggcggacaaatctatgtgaacatttacgggcatgagacaagagcttccaatcgaagcattgagtttaccagtgtgacagataagaccattaagcccggggatgatgtcattaccaaggatgacacacagccggagggatggcaggaagtgacacagagcgcccatgacggctatgtggcatcgttttataagaagatttacgtggacggaagccttcaggataccgtctggatcaacacaagttattacagtgcgtctccgaggtatatcactgtcggtacgaagaaggaaagcagtgatgacattagtgatcagaaggaagaggcagataatacaagcggcgacaagaagaatgagtgatgtatgcgcagcgtcggtttgaactgcggagcattcgatggtcgatagagaatgaatatcaggagttgggatatgctggattacggcaaggtgacagacacaatttacaaacgttctgtaaggaaagtaatagagagaaatgtgccgggtgcgggggacgatcgcatcggcggaagggatatattatattttgcggcggacagtgataaagcgatgctgacggcttttgcgacattgacaggcaatcagctggcagcagcaggtgcggtgcatctggcagtcaatcgtctggcagcagcaggcgcctatgcgctggctgtgaatatacagttgatcgtatccgcggaattaccggagaaatccatcaaagcactgatgggatcggtttctgagagctgcgggaagcttcatataacatccgtgcaggcggatgtagctgcggttccgggtttgacggaaactgtcattacagcaacagctattggggaagccggaggcctttttgaaccggaaaaggccgaggcggaccaggatattatcatggctggttatgcaggcgattatggtgcggcaaagctggcttttgccggtcaggcagagctggagcggcattttaatcctgtatttttgagtcctatgatggaagcggattatacaggagatacaatttcggctgtatcagctgtcaaagcggcagcggcagccggagtgagaagtatgtatgcctgcggcgaaggcggtgtttatacagctgtatgggaactggcggagaatgcagggctcggagctcgtattcagctgaaggaagtaccgctcaggcaggagacagtggagatttgtgattattttaatatcagcccatatcagctgatgtcagcaggcgcagtgcttctgacggccacgcatggtcagaaagtattggcggagctggctgccgcgggcatcccggctgttatcatcggacatctgactgatgataatgaccgggtggttttaaacgatgaagaagtgcgctttctggagccatttcgatatgagagtctgaatcaggcaaaatctgaatcatagaaagcagacagctggatttgatcatctatagcaatcatagaaaaggggtatgagaaaatgaatgaaatgaaagagaagattttatctgtcatagaaaaaaacagcaagatcagcatcaaggatcttgcaattgtactgggtgaacctgaagaagaagttgcaaaagccatttatgagatggaatcagacaagacgatttgcggttatcatacaatcattaactgggataagacaaatcgtgaaaaagttgtagcattgatcgaagtgcgcgtgacacctcagagaggtcatggttttgaccatattgctgagcgtatttacaacttccctgaagtggacactgtctatctgatgtccggtgcttatgatttctgtgtgatgctggaaggcaagactttgaaacaggtgtctgcatttgtttccgaaaaactttccacactggaatccgtgacaagcacagcaacccattttgtactgaagaaatacaaagaccacggtacaatcatggtttctgagacaaataagaaagaaaggcagctgatcacaccatgagaaacccattatccgataaagtcatagacattaaaccttccggcatccgtaagttttttgatcttgtcgtagaaatgaatgacccgaatgtcatttctcttggtgtgggtgaaccggattttgatacaccgtggcatatccgtgaggaaggtatctattctctggaaaaaggccgtacattttatacatccaatgccggattgaaggaactgaaggaagaaatcagtgcttatctggaacgcaaatgccatgttgaatatgaccctgcgaacgaaattatggtgacagtgggcggttctgaagccattgatattgccatgcgcgccatgctcaatcccggtgaagaggtcattattccgcagccaagttatgtttcttatcagccgtgcgttgtgctggcggatggtgtgcctgtgattattaatcttcaggaaaaaaatgaatttaaactgacagcagcagaattggaagctgcgatcacaccaaagacaaagattctggtgctgcctttcccgaacaatccgacaggctccattatgacggaggaagacctaaagcccattgccgaactgtgcgtgaagcatgatattttcgttatcagtgatgaaatttacagtgaactgacttatgaatatccgcatacatccattgcatccctgcctggcatgaaggagagaacggttcttatcaacggtttttcaaaggcttatgccatgacaggatggcgtctcggttatgcctgcgcaccggatgtgattctgcatcagatgctgaaaattcatcagttcgccattatgtgtgcaccgacaaccagccagtatgcggctgtggaggctcttcgcaatggtgatgatgatgtagccacgatgcgtgaatcctacaatcagcgccgacgtttccttgtacatacattcagggagatgggactggactgctttgaaccattcggcgctttttatattttcccaagcatcaagagcctgggcatgacctcagatgaatttgcggaagaattattgaagaaggaaaaagtagcagttgttccgggtacagcattcggagacagcggcgagggtttcctgagaatttcctatgcctattctcttgaagaattaaaagaagcgacagaccgtatggcacgttttgtcagctgggtgagaaaagagaaaaatctatgagtatgaatattgttttactggaaccggagatgcctgccaacacaggcaacatcggacgaacctgtgtggccactggtaccaaactgcatctgataaagccgctgggctttgaaattacggacaagatggttaagcgtgcgggactggactattggccgcacctgaactatgaagtgtatgagaattttgaagattttcttgagaagaatccggattgtatcggcaagctttatatggcaacaacaaaggccagacatatttacacggaagtggcctatgagccggacggttatctgatgtttggcaaggaaagtgccggtatcccggaagaaattcttgtgaaatacgaagattattgtatgcgtatcccgatggaatacaacatacgttcattgaacttgagcaattcagtggccattgtgctgtatgaggccctcagacagcatcagtttgcgcagatggaactgcaggggcatctgcacagactgcattggcacgaagagtgacgaaaatatcaagtgcttaaatttgttggtaatataaataagtacttttctatttgacgtctttcggatataatagtgaagaatcttgagacgctatagagaagaggagaacttttatggaaaacaaaagaattatacaggttgatgagaaagtccctgtaaagctgctgattccgctcagtattcagcatatgttcgccatgttcggtgcatctgtgcttgttccgttcgtgtttggtattaatccggcaatcgtgttgtttatgaatggtcttggtacgctgctgtttattttaattacaaagggacgtgcgccggcttatctgggctccagttttgcatttctggcaccggcaggtatcgttatcagcaaatggggctatgattatgccctgggttgtttcgtggccgtcggcttctgcggctgtattctggcattgattatttacaagtttggttctgagtggatcaatgtggtcctgcctccggcagcaatgggccctgttgttgcccttattggtctggagctggcaggtacggcagcttctaatgcaggcctgaaggatgaagtgcttcttccggccaatatcattgtttttctggtgacacttttgacagccgttatcggttctgtcgtattccgtggatttttatccgttattccgattctgatcgctattattgccggttacgtggcttctctggcatgcggtattgttgacttctcaaaagtggcagcggcgccgttgtttgcccttccgaacttccagacaccgaagttcaatatgcaggccattgctattgtacttcctgttctgttagttatcacctccgagcatatcggacatcagattgttacaagcaagatcgtgggaagagatttgctgaaggatcctggtctgcaccgttctttatttgcagataacttttcaacgatgctctccggttttatcggttctgttccgacaacaacttatggtgagaacatcggcgttatggctatgacaaaggtttacagtgtttacgttatcggcggtgcagcggtactatctatcatctgttcctttatcggcaagatgacaacactcatcagtacgattccgggaccagttatcggcggaatctcattcctgctctacggtatgattggtgcatccggtatccgtatccttgtagatgcacaggtagattacggcaaatcccgtaatcaggctatgacagccgttgtattcgttacaggtctttcaggcatttccgtacagctcggaagcattcaattgacaggtatggtactggcctgtgttgttggtatgatcatgggtctggcattctatattctggacaaactgaaactgacgaacgacagagacgaataaattgagcgaaacgcaattcggttcttaaaagaacataaaagtaggctgccgcattaagactaagatagtgcggttcagatgatttaagaataaaaaaaataagcatgttcacacaggcacgtttgctctgccagcgtctagcagcggtacataaggcagcaaaagacgctgcctaagtaccggctgacgctgaagcacctgtgtgaacatgcttattttttatcttattttcttaagtattatgaccgcacaaaatttatgatttagagcgacagccttatttttatgttctatcctagaaaatgggtgtttcgcaatcgtatttatcctaaggttgaggctaaacaagaatttttcaaatatgactatttgttcatttgagtgggtgcttcgttatcatattcatcccaacgctcccgaccgacagtaggcggccggtcaaattctccatctaaattcagttgcccgccaaattcagcagcccgttcttcaagagacttatgttcaacaccattatttcttggtttcattatttcctctccacttctattgtacgaaaaagtttttatattttttaggaatattgtaattcagtaaatccagtaagcttgaaaagcgccgactaattaataagttcgaagcaggtgcttccaccgcatccagtacttaggcgttgtattttaacgccttatgtactgctgatagcgttgggcagtgcgaacgtgcctgctttgaacttattaattagtcagcgctttcataaccttggataatgaaacaaagaaactaaaaactatttcgtaccaaaaattctatcgcctgcatcgccaagtccagggcagatataggcatgttcgttcaggcagcgatccagatggccgatgtagatctgaacgtccggatgtgcctcgtgaagagctttgacaccttcaggagcagcgataatacacatgaatttgatgtttctgccgccatgtttcttgatcatggtgatggcatcaatagcagaaccgcctgttgccagcattgggtcgcagacaacgatggtacgttcttcgatcgggctaggcagtttgcagtagtattcatgaggctcgaaggtttcttcgtcacggtagagaccgatatggccgatttttgcagatggaacgagagcaaggataccttcaaccataccgagacctgcacgcaggatcggaacaatagccagcttacggcctgagatcattggtgtcttgcatttttcaatcggtgtttcgatttcaacttcttccagaggcaggtcattgagggcttcaaaaccttccagcatagcaatctcttctaccagatgacgaaattcgtttgttccggtttctttttttctgaggatagaaattttgtgctggatcagtggatggttaaaataagtaacgttttcaaatttttccataatgctctcctttaatcaacatttctcttatagttttatgttattcatttgccattccttcaggcaaaattattccaatgatagtgtacgtgaaaatgtacattttttcaatgataaatcatgacaatttttatttttacagctgttttgagtcggcatgcataatgggctgccaattacttaaattcgacgatggtaacgccggtctcaccctcaccaaatgttccaagacgataactcttgacatatttgctcttgcgcagtttttcgtggacagcttttcgcagagcgcctgtgccgcggccgtggatgatggtgacattcggtatgtgggccagataagcatcatcgagatatttgtccagatcgatcatggcttcatcaacggtttcaccgatcagattgatggaagtattgacatgggccgctttattcatcttgatcttgccggagccggtcttattgatcatcggtgtgttgatgacttcttcgtcaattggctccagatcactgaagtgaatacgggatttgagaatgcccatctggatcgacagttcacctttgctgtttggctgggagacaacggtgccttttaagtcaaggctgcgaacatggacggaatcaccctgcttgaaatcagaagctgcatagaccttggccttttgggcagtcggcgcagctttcttgcggttgttggattgattcagcttgtcacggacacggcttcgctcctgttcaagggctttcatatccacaccgccggatttcgacagtttattcatagtacggatggtatgatcggcataatccttggcatcctgaagaatgttctgggctttttcattggcttcgttgagaatccgttctttctgtttggcaatgttgtcatgcttttcttccagacgtttcttcagggattccacctgagccttgtaagcggataattcttcctgctctttctcaatggtggcacggcttgtttccaggtcagcgatcagttcttcaaaattctgttcctgaacatcaatattcttcttggcttcctcaataatatgagccggaaggccgagtttgccggagatggcaaaggcattgcttttgccgggaatgccgatgagtaagcggtatgtcggactcagggttgccacgtcaaattcgcagcaggcattgcagacctgatccgttgtcagggcaaataccttcaattcgctgtaatgggtagtggccatggtggtgacatgtcggttcagtaacgttttcaaaatagcaatggccagagcggcaccttctgtcgggtctgtaccggcgcaaagctcatcgaaaagcaccagtgtcttggcgtcggccgcattcagtattctgacaatattcgtcatatgggatgagaaagtactgaggctctgctcaatgctctgttcatcgccgatatctgcaaaaacatcgtcaaaaatcgccagttccgaatgatcaaatgccggaatatgaagacctgcctgccccatcagtgtgaaaagaccgaccgttttcagagagacggtcttaccgccggtatttgggccggtgacaataagcatccggtaatccttgccgagaatcaggtcgattggaacaaccttcttcttgtccagaaggggatgacggccttttttgatgtgaatatagccattctcattgaaaacaggttcgctgccattgtaggtacgggacagggaagccttagcgaaaataaagtccagacgtgtcagaaccgcaatgtcctgttccagcataacagcggattcacctgccagttcacttaaagtatccagaatatgttcaatctcttccttttccttgctgccgagttcccgcagatcgttgttcagcttgacaacagccatgggttcaatgaacagtgtggagccggtggaggactggtcgtggatcataccctgcacctgtgaacggtattcagccttgacaggcaggcagtagcggccgtttcgcatggtgaccaggttgtcctgcagtttggaaccgatattttgggaagaaaccatagatgccagctgtgagtggatgcgttcgttggtcagtttgatctggcggcgaatggatttcaatgttggactggcatcatccgccatggtttcttcatctataatgcatcgacggatttcgtggttcagattcgacagtggttcaatctgtgcaaaaaggccctccagcgaatcctgatcttcatcatcggcttcacggcgtccgtaggatttcgcacgcagtgccacatccagagtggcagcgatattcaacagttcagccataccgacggtactgccaaccttcagacggagcagggagccgcggatatcacggatgccggagaaggagagactgccctttttcatgacacgggtcagggcgtcactggtctccatctgtccctgaagaatctcagaaatatcagaggaaggcatcagattacggcacagctccttgcccataggggagctggcatagccggtaagcatatctatgatttttgggtattcgagaatacgcaatgctttttcattcataagtaaaaacctccaaaataatagtaaagcataacggccttgttgtcaaacttttcgtcttctcggaagggcaaaagtctgatatactatagtattgaaaacattgatgaattagaaaggcagaaccccgcaaagagcgggcagagtgagagtatgagatatattaacgaattaaaatcaggcgatatgatttcagatatttatttgtgcaaaacgaaacagacattgaagacgaaggcaggaaagagctattattctatgatgcttcaggataagaccggtacggtggatgctaaggtctgggaactgacaccgggcattgaatattttgagccgatggactttatcaaggtagaaggacaggtgacttctttccagggatcactgcagctgaatctgcgtcgtatccgccgtgccaaagaaggtgaatatattccggcagattatatgccgtgcagccgctatagtatagaagatatgtacaaagagctgatgggatatgtagacagcgtcaaagaaccgcatctgcatgaattactggaattattctttgtaaagaatacagcatttatcaagtcttttaaggagcattctgcagcgaagagcattcatcatggttttgtgggtggattgcttgaacatacacttagtgtaacaaaactctgcgatttttatacaacccgttatccgcatctgaaccatgatctgttgatcacagcagctatctgtcatgatattggcaagacaaaggaattatccttattcccatccaatgattatacagatgagggacagcttatcggccatattgtgacaggtgtggagatgatccatgacgccatccgtgagattccgggattccctgttgtattggccaacgagttgaagcattgtatcgtggcccatcacggtgagttggaatacggttcaccgaagaaaccggcactgatggaagccatggcactgaatctggcggacaatacagatgcccgcatggagacgatgacagagatcttcgaccgttcagaagataatctggaatggcttggatttaaccgcatttttgagtcgaatatcagaagaacgtccaaataatacggaatggagtcagggatggagaaaaagacaatcaagaagaatgatatatatacaatcgagattgaagatctgagtacagacggttccggtatcggcaaggtggatggctatacactttttgtgaaggatgcactgatcggtgatacagcggaggtcaaagtcatcaagacaaagaagcattacggttacggtcgtctgatgcgcatcatcacaccgtcaccggaccgtgtggaggcgccgtgcccgcatgctcgcagctgcggcggatgtcagatccagcatttatcctatgaacggcagctggctttcaaagagaataaggttcggaatctgctgagtcgtgtgggacatgtggaagattatgtgatgcatccgattattggcatggagcatccatattattatcgcaataaggcacagtttccggtgggacttggcaaagacggacaaatcgtcacaggattttatgccggtcacacgcatgttattgtagactctgcccattgctgtattcaggcaccggtcaatgagcagctgcttgttattgtcaaaaaatggatgacggatcatgatattgcaccttatgatgaaacgacgcataaagggcttgttcgacacattctgacaagagttggttttaagacaaaggagaccatggtctgtctcattatcaacggcaaaaagctgccgcacagtgaaagtctggtagaagccctccgtgagattccggggatgacaagtatttcctttaatatcaatcaggagaagacgaatgtgatccttggcagtaaagtggtgacactctgggggcaggattatattacggactatattggtgatgtccgttatcagatttcaccgctatctttctatcaggtgaatccggtgcagacagagaaactttacggagcggcccttaagtttgccaatccgggaccaaatgatgttatttgggacttatactgcggtatcggtaccatttcactttttatggccaagaaagccaaacaggtctatggggttgaaattgttccccaggctattgatgatgccaagcgcaatgctgcaatcaatgatatacataatgctgaattttatgtaggaaaggcagaagaagtactgccgcagacttatgaacgtgagcatatccatgcagacatcatcgtggtggacccgccgagaaagggctgtgacgagagcctgctggcatgtatcacacagatgcagccaaagcgggtggtctatgtcagctgcgatccggccacattggccagagatctgaagtatctggaagaaagggattataaggtcaaagaggttcagtgtgttgatatgttcgggcactcggttcatgtagagacggttgttcttttgtcccaacaaaaaccagatgacacgatagagattgacttagacctggacgagctggatgccaccagtgccgagttgaaagcaacctatcaggaaatcaaagattatgtgctgaaagaatttggcttgaaggtttcaaatttatatatttctcaggtaaaacgcaaatgtggaattgaagtgggagaaaactataatctgccaaagacagaaaatcccaaagtgccacagtgtccgaaagagaaagaagatgctatcaaggctgccctgaaatattttgcgatgatttaaggatatcgctgatttcaaggaggaataacacatgaaaagcacatttgaaaaaatgggtggaacctacacacttggcgcagacggaatttactatccgaatcttgtcagtacagatgaagaaccgcattatgggaaatatggaatgatgcgaaagacatatcttaaagagcatcgtccggcaatgtattcactgtatatgttggaagacagactgacagaacatctgaatgctgtagacaacgaagcacaggagaggatgggtattctggtgcgtcagatgatggagaggcagagcattacggaagaattgaaagctcgtgaccagatggcatgggtcagagcagtaaatggtattcgtaatatggcagaagagattgtgttaaatgaattgatttacaggtaaacaaagagctgaacaggtaggaagaaaaatcctatttgttcagcttttgtgtttataagagttctaagaagaatcgaattacaattccatatcaggtgactttttctaagttccggaaggctggttttttccgtcatagtcataagttgccgatttaattattccatagtatgccttaaaaaatattcgaagataactttatagaaataatcatgatggggagattatttgatgaattttgtgttaatattctgcaattctactgctggtcgattgatttatgcgtactcccattataatatgtgtgcaggaggtgtgcgccagttcggtgccgaatatatagttggtgggaatccagtctggtaagacctagcaagtcgccagtaccgagtccttggagcatcgaaggctaacaatgatgtttaagcgtaggacagggaacaggaacgccgtaatgcgaaagcgtgaagtgattgagcttcgttagaattatcgattgtgtggggtggtctgctacctccttgggtcaccaataaggaataatcgctaagtgagattatgaaaacacaccggagtcccagagcacggcatacctgatatagttatattcgacatacctgggagacctggacagttctggacatgagccagtagggagtatcggccaatgcaatggtgagtacgaacgaagactgttgaggagtcggattcatccatagtaccgatgaaggaagtaatgactctggaggaaagggatggacaataagtcgcttttgcaatcaaaacatagaaagcacaggaggcagacattctatggaaaaagagaaagcagaaatagccagtctcgtagaaaaatatggaagagtccagtcgttaatgaaatacgtcaacaaggatacgctcaaagaatcttacagcaaacagccaaaaggtaaagcggtgggagcagacggagttacaaaggaagaatacgggaagcgggtggaagaaaatattgaaaatctgatagtaagaatgaagaaattttcctacaaaccatacccggtacgcagagcctatattccaaaaggaaatgggaaaatgcgaggactgggaatcccgtcatttgaagacaaagtggttcagggtgttttcaaggaaatacttgaggcgatatatgagccgaagttcaaagagttttcctacggttttcgtccaaataagagctgtcacgacgcaatccagagggtaaataaacatatcatggcagataaggtaaattatatagtggacgctgatattaaaggcttcttcgataacatagaccatgagtggatgattaaatttctggaacacgatatagctgataagaactttatacgatatatcaaaagatttctgataggcggagtcatggaagacggaaaacggctggaaacagaatcaggaacggtgcaaggcgggctgatttcgccagtgcttgcaaatgtgtacctgcactatacgttagacacatggtttgattatgtgaagaagcacgagtttaaaggagaaatgtatatggtacgctacgcagatgattttgtttgcctgttccaatacgagaatgaagcacgaaagttctatcagcttctgattgaaagactgaagaaattcggactggaaatcgcagaggacaaaagcaggatactaccctttggcagatacaagggaacaaaagaaagctttgattttctgggttttacgcattacaatgcgaaaagccattgggggaaatactgtgtactgcacagaacaagtaaaaagaagctgaaaataaaacgagaggaagccaagaaatggatatgggagcacatgcatgaaagcatagccgacacggtagagacactgaatataaagttagcagggcactatcgctactatggaatctatgggaactatataggactcataaaatattatgtgtatgtgaggcaggaactctggaagagtaaacgtcgcagagaccagtcttattggctgacatggaaaaagtatcgggagattttaaagatacatccattggaaactccgaagatatatgtaacaagtgcttattaggcgaaaggcttattgaagagccgtatgccttaatagggcatgtgcggttctgtgaggggcttttgagacttgaacctctcatcgcaaaagaatatagatgaaaggaagtgaaaaagtcgagacaaagtctactcgacggatgtatgtatcaaattagtaatgaaaaatttggtttatttgtaaccgaattaagaaaggaaaagaatttaactcaaaaggatttggctgaaaaattatatgtatcagataaaacagttagtaaatgggaacgtggtcttagtatgcctaatgtcgtattactcataccaatagctgatatattagatgttatcgttacagaattgttacgtggagaaaaaatagatacacagaaaaatattgatacaaaagaagtcgaggaattggtagtaggctctctcgatatggctgttaggaattctattcatcagcatagaaaaaactggatattagcatatttgctatgttttttaatatctattacagaaattattatgttagttgcatctgggaattcaatagcagagatgaaaggtgatatattgctggttacagggttaatgcttttatttggtgcatggttttgtttctttgccaaagacatgttaccaacatattatgatgccaacaagataaattatgtttcacaaggaatttttagaatacatctagtgggtttatcctttaacaatggaaattggatgtacatctgtacaactttaaaaatttggacacttgcaacggttgttctatatcctcttgcaggtattataataatcaattgtctcaatatagctttatgggatattttaaataaaattttcttaattatgatattaggtggtatggtagtttcgatttacattatcgggaaaaaatacgaataattaaattacctgctatcgttgtggatattactaatttacaacattcttcatgggaaataaggaatgatgcagaagagattgtgttaagcgaattagcgtacatttaaaacgtggaaagctccttcgggagctttttgctggttatcaagaaagtatatagaaaatgcattaatcatatggtatgatttgaacagaagatagaatcttatgaagtaagaagaatattttggaggaacgtaacttagaagttacagaattaagttaatcgtgccatatggcttgattataaacgcaaagataaaaacgcaacgtacatctttgatgtgccagagccggtaggtagcccggccgtcctatataaatagggtaagtaacctgcccctccgggttgtccattctttgttcaatcaattttaggagggattcttatggacaaagtaaatggaaagctgacagtattttttgaagagccgttttgggtgggaatctttgaacgcatcgaagatggtaaattatctgtggcaaaggtaacatttggtgcagagccaaaagattatgaagtacaggaatatattcaaaagtgctatttcagtttgaaattcagtccggttgttgaaactgttgtaaaggatatcaaaagaaatccgaaacggatgcagcgggaagcaaagaaacagatgctggaaataggcattggtacaaaatcgcaacaggcgttgaaattacagcaggaacagaacaagcaggaacgcaaagagaaaagacgcaagaaaaaagaggcagaagagcagcgaatgtttgaactgaaacagcgacagaaaagagaaaagcgtaagggacattaaagtcccttgggcttttactcaaatcgaaaagtgttgaataaagctttcgggaggtgtttctatgaagaaaaaagtacttgcaattatgttagttgccatgtcaataatgttgatttcggcgtgtggaaaaaaagaaaatctgtacgaaattcctgatctatcgcagtataagacagattatgtaggagattcttcgaatgttataaatattgtaagcggtcaagagtatccggagggatactcatatgatagtatagagatacagtctgaaacagagccttatggattaacagtttttctaaaagatgagccgtctgcagtcaagcttgaagatgaattgcaggttaatgcagatatgacatttgatttgattggtaatttgggaacaattgattataaaacagcagatagcaaagaaattattgtatcatatgaacggtgatatatttttagtcaacttttagacaatttgaagagcagaatataaaaaggcgtatggaagttttgatttccatacgcctttttgaaaggagtttatttttgaacaagagatttgtaagagtatattatctactcgaagatgattacaattccatatcataggactttttcttagcccaagcaggctgatttcgccgcatctcctgtttcctctgacattcaagttcccaggcacgatgggagaagacatcaggatcttcaacattcagataatccacttcattggcggcaatatcacggcggtgatagtcataatacttaccaaaagtacctttgagctgctcgatcagcttatcccggaaatcaggacgtatctggattctggtgtccagtaattctgtatactgttcaggttcaggacgaaatttttcttcccggaaagcggcagcatctttttcaagctgttttttgagcgagatgtcctgagaatccaggatatcaagattgttattcatctggccgtatttcttggatagattcgtcatatctttatcggtagagcattgtgcctggaagattagctgctctttccttgatttcagttcttcaatttcttcggtaacagtggtaagctgctgattcaattttatatgctggatgggattcaaaatactggttttctcttttttcacattcagttctttccgctctgtaactttagctttgagtttctttttaacggtgttgtatttattcagtattggattaaaatgattcatccagtcatggatcacttctttttgcatctcattgtggagcaaatgatattgtgtaaaaatcatgtgatttcggattgcttccaaggtttctgcaattattggaatagacttttctacagcttcagccagttttgctacttttgcttttaattctcggagcattttgttatccgcacgaatctgacggttgatttcacagcggtctgctatcatgcctttcttttccatattctgggcaatgtagccttcatggatggttggctgttcggtgattccctgagctgcaaagctgcggtgatcaatggcggcatttatctgattacgtgcaagcattttatttacggcatctgcccagtttgctctccagatatggagttgttcatcactgttccattgttcggaaataggattctgtctgccatatcggctgctcttggggtgtttatcaatccgttcatatcctttttcctgtgcggcagaggaagtcagatattctttctttttcccaactttatagcgatattgcttttcccatccctgtttctgagcagttttaaattcagaagcagtaaatcctttttcttctccatctttgatacagagatattctttttcggttttatactgccatgttccattttcatttagtggtcggacagtaagaagaatgtgtgcatggggattgtgaccatctgtatcgtgaatggcaaaatcagcacacattcccatatctacaaaattcttttgaataaaattttgaagaagagaaatattgctgtctttatccaactcaacggggagtgcgacaacaaattctcttgcaagtcggctgtctttggtcttttcgttttcttccacagcattccagagttgttcccggtcattccattccaatggagccattgaaggaagcatcacctcctgatagatcagcccctgctttctggtatagtcatgctggatgccgtcataatcattgtacatgcggctacagctcatataagcagaagcagcaacagcagaccgaccggaaccacggctgacgactttggcttgcatatgataaattgccatatctggcacctcctttcgatgttgcctgcaacagcggataaagccctcggcagagcgcacgagccccgaaggggataccactgcctgatttatcaggtggtgagtaagtgcgcccttcgggagtagaacttgtgcgtttacattccccgtaaccggatcatcagctcccgttttagggaatctaaatccatttctttaatatggggaacaatactttccagaattgctccttcctggactaatcggtgtgttctggcatcacgctcttttttccgatttcttgcttcagcttcttcctgacggtgctttgcctgtaaaagtgccttttcttctggtgttattgtccttttatctgccatatctggcacctcctttttatgcccgtatccgggcaattttggtttcaaaatcttctggtctagtactatagtttcggataactgacagtggcatatttctggtgatgaatatgaaaagaaagtagcaccactgccagtgagaaataactattgagttatactccgttgtttcaattctggttcaaatcaggattgcttagcaggattttcttcgcctctttcaaattggcggaagcgttgtcctgacggatattccggttattgatacggacaggaatacatctctctagaatgcggtcataaattcgtttgtgtgcgatatcagcggcgttattcagctctgataaagtgagattggtcgttatgatcaggggctttttactgcggtaacggctgtcaatcacattgaatacctgttccagtgcaaagtcagagttccgctcaattccgagatcatcaataatcagaagactgtagcggtttaagctgttgatgaactggtttctgtcttcaaaatgcattccggtaagggtattcagaatccgggaaaagttggtcatcagtacaggaacgcctttttccagaagggcattggcaatgcagcctgcaaaaaaagattttccagtacctacatcaccccagatgagaaatccggaagcgtttgctttcatctcttcccagttacttacataattgtgtgccagttttatttccggattgatgccgttatccctggcaaaagtgtagtcatagagtgctttgtcctgtaagccgctggttttaagatgctctatttccatttgtttttcatgaagttttctctgggcctcttcctgctcaaagatttcctgctggcatttacagcggatggaaggaataagaacctttccctgtaattcatgccggcattgtcttggcgtattgcatttggaacagtagatcaggtggtctgtttcgttaaaatattcatcaggctgaatctctctgtttggtgttatagcggttgctttttctgtaaatcttgtcatagtgtttcgtattcctcactttcgtaattcctttgccgggaagcaggatgatcctgtcttgcccaactgatgatggtagctgcatggttctgatattgctttccggtagaagccatataaccggataagcgttcaatataatccttccagtcagggattgtctgccggatatcttcaagctctttttctgacagaaaaacattttgaaattttccatagggtgagagtggctccttactccctcttttttctaaattgttcttttttatctctttcttattaccagacagttttctgtctgtatcagggaaagaatcctgtctgtcaataggacagttttctgtctgtcttagggaaagaaatctgtctgtatagtggatggtttcttttgggagttttacataaatccgattgggctgtccgggtccctgccgttttcggaagataagctcctgtttttccagtactgccagagcagttttaaccgtcatctggcttttatggagaacttctgccagtgcttcaattgtaaagtaaatgaacacatgaccattgatatctgaccagccctcatttttctgggaaagccttgcccggtcgagcaggataatataaagcattttggcagtttcgtttatttccatgtccagaagaaaacggggaaacatcatataagatggcaggttggtgtctgctgtcagaaagtccgtcatgtgttcacctccaatcagttattctccaagaaaatcccagtctacatcactatctggctgtgaattttcaggtgttggaaaggacgccctgatttggggctccctttgcgccatgcctgcagtcagtccggaaagaaaaagtggcaatgcctgtttcagactgttttccactgcatctacaatctgtttcacaaaaagttcttcccgttctcttgtttccagataaggatcagcctgtgtgcggtagtagcggtcaaaataatctaccagtgcaagagagattacctgactgtaagatttaaaatcctgcctgtccattgtctgtaaatattcccaggctctccgctgctgttctttgcccagattaaagcgcaggttggtgttgcggatattgttctgcatggtttatcccctccttttcaggctcatataagccagagattcgtaacctttggcggtggcgcagatgtcatcaatgatggtgactcgtgatttgtcatacgttccgaagttacggatcaggcatccaccgccgccaactacatacaggcgcatcaggtcaggattgtattcatatttgcggagcgtggaaaaaagttctgccacatactgtctggcaatagaactgatacaatccagatatggtgctgaaatgtcagctgttccaaaccgcagaatctgttctactgtggattcttcaattttcactccgaatttgtccagaacagcgttctttgcggcaatcatgcactggtttacaccaagtttttctgtccagcatcggctctcctgcgctttcttattgttgacatacagaatgttcatggttccgtttccgatatctgcaaggagattggttcccttgaaatttcctagttggtttacgatagccggatacccctgtgggtaaaggctgcatcccacaaagcggagatgatactctttgccgttaaaaaggtaatggacttctggattctggagcagataggaacgaaaagcttctctttgatttctgatccatgtgagaggaagtccggcagccagatgaacatctgcttcacggatggaaaagacattcagttcccttgcaatagccattagtgtcagaagataatattcttcgtccatagctttatccgggataaattctttgtgtccttcgccgatccggtagtaaatgccgttgtattccagaatattcccggtgaagatcggttcagtttcataggctttgatgccggttggggtgacggtgtttgctgttttcatattgccgtagccatgatctacagcaatgatttttgtgtttctgagttctcgcataaaaaatacctccgttttcgtattgattgattcagcaggtcgtaccggtgtggtactgctctgctgtgggataagcatacgaaaatcggaggaaaaaggcattgaggggaaattgagctggaattgagaaaaaataaactttttattgataaataagtttagatactaactcttttgtcgttttggttgttaattatattaaaagtagaaatattttgataatgaaagtgtgggagagaaaatgaacaaaagaagatacagcaatcgtagaagaaagaatattttacgagtattcattcttttaatgactatcataataaccgttgtaatgtggagaacaataaaaatcgatgtgcaggttggagaattaacattaccgaaaatttcgcagtcagaaaagtcctttgcagacacttcgggtgaatggaatcttattttggtcgatcgaaatcattatattccaaataattatcaagtagaattgacagaattatcgaatggtaaaaaagtagattcacggatttatccagaattacaacaaatgtttaatgatgcaagagctgaggggctggcactgtttgttagagaaggatatcgaacaacagaagaacaacaaaaaattatggacgagaaaatcaatgaatatgaaaaacaaggatattctgcgaaagaagcaaaaaaaagagccgagaaatatgttgcaattcccgatacaagcgaacaccaattaggactgagtgttgatattaatgcggataccgacaaatgttcttctgaaaaagtatatcaatggttagacgaaaatgcatataaatatgggtttgtaaaacgttacccggaagataaaacggatataacaggaattagtaatgaaccatggcattaccgttatgttggaacgactgtcgctaaaataatgaaagaagaaaatttatgtttggaagaatatttagaaaaatataaataaaaacaaaagaaaatcctaactttttttatagtaggattgttatattatttagaaaacagagggaggcaaatttgcgaatggaatacaaaactgattctttgttagtacatctagcaagagcaggagatgaagatgcgtgtgaaaaactggtcaaaaaatattactcaagtatatatcaatattgtttgctacatatcaatgatccctatgaggcagaggatttgacacaagaagtgtttacacgtttcttttccaatttatatagatataaagaatatggaaaagttaagaattatctttatacaattgccggaaataccgttaaaaattattacaaaaagaaaaaagatattccatcagaggaactgctaaaatcagaggactgtagtaaaaatcatgtagaagagctaggagtccgattaactattgaacaggcagtgagaaagttaccggaagaaattagagaaacggcagttttatatttttttcaggaattgaagcaaagagaaattgcagaattacttcatatcaaactttctcttgtaaaatatcgaatcggaagggcaaaagaacttttaatgaaagagttggaggtgaaaaaagatgaagaattataagcaacaaataaaggaatataaagaggagattgaagaaaagtatgtaagggctgaaacagagaacaaaacagtaaaagcatgtcagaatattttgtcagagtcggttttatcgaaacaatcgcatagaacatcttattttgaatttttgtatgagcagacaaaattcataaaaaaaagatggtggattttacaaggttgtgttcttatgtgtctatggatatggttgagtaattatacgtcagacataaaagatatgatgaggattatgggaatatctgccacaatatttgtggttctgattatcccggaaatttggaaaaacagaagaaatggtgcgattgagattgagcaggcgtcttattacacactgcgtcagatttgtacagcaagaatgttaatgtttggagtagtggatctggtgatcgttatggtgtttttggcaattacatatcaaacaacaatactctcgttaagtgatttggtggttaattttttgcttccggtaaatgtttcatgttgtatatgttttcgtgtattgtacagcagatgggaaaaatcagaatatatagcagtgctttcttgtctggtatgggttggtttatggataatgattgttgcaaatgatgttatttatcagaaaattgtaactccggtatgggtggttatgctgatattgacttttgtatattttattttttgtgttcagaagtcattgctatttgatgaaaaaattttggaggattacacgtatgaaattagaatttaaaaatgtaacaaaacaatacggagaagtaaatgctgttaataaagtgaattgtgttatggaaaaaggaatttatggactgcttggagtaaatggagcaggaaagaccacattaatgcgtatgctttgtacgattgttcaaccatcagaaggacaaatattatggaatggtaaagatatatggaaactaggaggtgaataccgagaagttctgggatatttaccacaggattttggatattattcagatttgaccgtatatgattacatgatgtacatttcttctataaaagggttaaaaataccgtttgccagaaaaaaagtgaagcaattattaaatcaagtaggaatggaaaaattcagtaaaagaaaaatgaagaatttgtctggaggaatggttagacgtgtaggaatagcacaggcgatgttaaacgatccgcaaattcttgtcctggacgaacctaccgctggattagacccgaatgaaagaatacgttttcgtaatttaattagtgaattgtcggaagaacgtttggtgctcttgtctacacatattgtatcggatattgagtacattgcgaataatattatgttaatgaaagatggagaacttttttatgcaggtaccgcggaagaattagtatcttctatgaaagaaaaggtatggcaatgtaatgtttcgagaagtatgatagacaaatatatgagtgaatatttggttggaaatataaaaacaacaaaaaccggagcagagcttagaattatttcaatagaaaagccaacagaagatgctgtggctgtagaaaaaaatctggaagatgcatttctattttattttggagaaaaatcggaggaaaaacaagatgcttaaattagaattaaaacgaattttttcaaagaaaattaatgtatttgcaatcggattggcattgatacttgctgtcatttttagcggatttgcagttacaagtaatcgctatgtggatgagaatggaaatgctagtactggaattatggcaacaagaaaacttacagataacagacgagcatggaaaggtacattgacagaagatgaacttggaaaagttatagaacaaaataaaaatgcgatgacacaatcctcagaagaaaatgcgatttacggaacgacattacaaccgatagatgatattaggggttttataatatcggtattaacaccggatgcagaatatgatgaaagtgttctgaatcaaattacagaagaaaatgtgcaagagttctatgacacttatcataaaaatatggaaaagatggcagaagaatatggaaagacttctgtacagaaaaaatacttggaaaagaaatataatgaaataaaattaccagtagaatacgaatcttatagttcatgggatactatgattatgtatgtagaaacgtattctattattctggcaatcatagttggttttatttgtgctggaatatttgcagatgattttcagacaaaagcagatgcagtatttttctctacaaagtatggatgtacaaaagctgttaaaacaaaaatactggcaggaatagctacgacagttatgatttattgtatgggaattatattacttagtgtgatttgttttggaattatgggaaccagtggtatgaatacaccttatcaaatgtatcaggcgtatagtatttacattatgtcatatggacaatactatttgttgacagttgtatgtggatttatagccagtatgctggcggctgtagtgtctatgttagtagcggctaaaatgcatacaattagtgtcgctgtttgcattccgttctttttatattgcttattgccatttataggacgggcactttctgggtatacaacgcttttcaatttgataccaacaattttgacaaatgtacaggcaagtgtaaaagtcccacttatttatcagattgggaattgtgtatttcgacaaattccgcttgtaatggtaatgtatacagtgatggcaatagccttactgccttttatttataagagttttcgcagatacggaaataagtaaaaattgtattcatactcataaaaaacaaagtaagtaaaatattttctggaaaaatcaaagcataatttaaagatttacggcgggcaagttgcccgccgtaaattatgcttattttgttaaaagaccggatagattttttccaatgcaaaatccaatctgtggatataactcctgaatttcctgatattttgcttcaatcatttctggttcatcagcccagatcttttcatatattttgaaagctcttttaaaatgtgttttggcttgcggaagattggcagtcatcagataaatggttccaagggtttcctgtactttggcataatccagacagtcatcggaatggtattccttgatgatgccggataatttttgcaattcagagatgcctctttcgggttcctgctgttctgtcaggaacattgcataattggcaatctgaggtatgctgtcatttatatgaagcaggttaaattggtcaagcagtgagatacttttttccatgtgttctcttgcaagatcgggatgaccgttcatgcggtaaagtccaccgagattggcatgaaggttggaaacaaggcgagcattgtcagcagtgatattttctatctgggcaagtgcatccttttccagttttattgctttttctggcttgatttcaagagtagcctgaaaatccagtaacaatgcccggtcagaatcggtgccaatgtctttaggcttcaaaaaattttttaattcctgaatgatttctttcatacctttctggtaattataattatccatatatggaaaaacattttccagaaaaagtagatattttggtatatcatctttttcaatcaattctatgatgtttcctgctgtctgaaacagcttcttgtaataatcgacttcaattccatgcattaaacatattttctgtaaagaatccagtaatatgtgacagctacttacagatggttttgtctctgaaagggcaatttccttaatcataggatgcagggagattgtgtgacgtgtagttgtctgcacaaaaccagtttcaatcaagtcgttaatttcatttaaggtaggcagttccagccatttggcgaatatgcgggcagaaataccagtgtaaggaagaaaacacaaattgcacatgatatcctgctgttttcgggataaagcatatagtgaaaatagagtatggatatgactataataagtggctttactgctttgaccatccttgattatcttaattttatcttcattatcgagagatgctctttcttcctgaagttttgctaataactgacctggagttgaaattccattttccaaaagttttgcagccagttctacagcaaaagtatgatagtgtacggtctctatgattttttcgacggtcgaacgatacttgtctgcttctgaataaaatgcagatgtcagttggaaaagaatgtttatatcctttatttcttttaattgaaaagtacagtattcattcagattacttctggtcgtaaataaaatttgacagcggtattttaatactactgacagaaaactgtcctgtgtagctgtgacattaaaattatctatgataagcagagtatcggatttcagggaacgcagaaaacggttatgtctttgaaaccgttcctgttcgctgatttctggtggatcatcaataaaatccatgtcagtaatgtcctgatgaagatcacctgtatattctacatatagaatgttagtgtaatgctttttgtaatgttttgcgtaggctttggcaagttcgcttttaccaataccggcaattccgcaaagaaaaacatgacggttttcctcaagcatggtatataattcttctagttctttatctcttccgataaaatgacggcatggtttcggaacctcactgtccataatataatccagcacaatgggtgacagggcacctccggcaattaatttttgatttttagtatcacgtttgataaattgtcgctccatgccaaaagaaatcagctttgcaagaaaaagcagacgtgagctggctggtttgtacagagaagccagatttttctttttgacatcggagatggtgtcatcttgtataaataatgtgtatatatcctgcatagccatattgcagtcagacatcaatggaagcagattctggtgaatggtttctgccagttttttctgattactgggtttggaatagtaggcagatattttgggactgatctttgcttgaccggtcagccaacgacaaaccagaccattatccatagaaaaatcctgatttgccggatcatccataaaatcttcaaataattcgtataaaaaatcaggctgactcatttgattactttcgctgatatgattttttaagcaagtgctaatagaagaaaaatcgcatcgattcaatagaaattcccctttcgtagttaagattaagtatatctatcataacacgaacatatattcgattcaagaaaatgcggatatttttaaattgattgtgtcaatttacaatcaatttctattcaatgtggttttccggcaggttctgtaaaataagctcagatcaaaacaataacgggaggagcttatgcaacagaatattgaatttgagcggtgcattgattttctggtacggatgattgataagtacggcgaagaagtcctccgggagttggaggaagaaaaacagaataaggaagaaaaagaagcggcagtttcctgaaatacaaaatgtaaatcagactgtcgcttttttcatgcatttttaaatcaaataaattttaaaagctgatgcagagtgtgtggctcattattctgagaagcggtaatacgcgtatcaaatggcttgaaatgattctgcgtataaaagctcagaagaaattcattatcttcgcattcaagaaactccataacgccacctacggaatatttgagactggatatggtttccagtgcaaatcccagtagaatatttccaggaattcgtttttcctttggaagagaatagttctttcccaactgggcgatcaggtaagctgcggtagtataggattgtgtttcttcatccaaaatactgacacgggacagtttttttgccattgtcttgctgatatttgaagcacggacagagattggttttattgtaagtgaaaaataaccaaccagtgaagcatcttcagcatcaaataccagataagtgatagattgatcttttttggtaaactcaatcgcattatgtaataaaaagtattccacatcgggatttttgggacaagaaaaatcggagagtaagtcgtaaagactttcctctccgatatatgtcggttcgtatttatccaaatatgcccgaatattaacggtaaaatatttatcagacatgttttttcttcctttttgacattaaagctaagatttcctgtgggttcgttaactgacgtccgggaagtgtctgctttggtgtgcggtcacggtcggcttcgtcaattgctgcgacaaaacgctttacgctatttggattggatacgacaaaattatgagtaatacttgaagtagccatactaacacctcctcttttttggcttttttgtgtatttatagtatatgcaatgtgtgataaaaacacaatatcaaaaacagaaattatttctaaataattttcaagccggacatttattagacgcttccggtaagcgaacaatattttcgagccaatcatttataagtcgccaatggtgggcgggcaatattttgataacagaaatgctctgtatctaacttaattatacgattggcgaagaaatgcgtcaatacggaaaataagtattgaaaatagttggaacaagtactaaaataaggttgggacaataaaacagagttatactgcgaggaagattatgaagaataaaaagattaaatgcgatatatataccagagtatccacaaccatgcaggtagatggctacagtctggatgctcagaaagaaaaactcaagagatatgcggaatttcagaatatggaaattgtaaatgagtattcagacgaaggtaagtctggaaagagcgtagagggcagaccggaatttcagagaatgttggataatattgagaatggaacagatgaggtacagtttgtactggtgttcaagctttccagattcggtcgtaatgcggcagatgtattaaactctttgcagaggatgcaggattttggagtgaatctgatttgtgtagaagatggaattgacagctcaaaagatagtggaaagctgatgatttctgttctgtctgcggtggcagagattgaacgagagaatatccttgttcagacaatggaaggacgtaagcagaaagccagggaaggaaaatggaacggtggatttgctccatatggctatgaattggtaaatggagaattgcagattgcagaggacgaagcagagattattcgtctgatctatgacaaatttattcataccaatatgggaatctctgcgattgccgcatggctgaaccagcatggatataaaaagaaaaaacgacagaataatacactggacgcatttgcctcttcgtttataaaaggcgttctggataatccggtatactgtggaaagttggcttatggacgaaggaagaacgagaaagtttcaggaacaagaaatgaatatcgcattgtaaaacaggaaaattatatgctgcatgatggtatccacgaaggaattatttcagaaacagattgggagctggcacatcaaaaacgggaaaaaacaggtgtgaaatatgaaaagacgcatagtctggatcatgagcatatcttatctggaatattgagatgtccgttatgtggaagcggtatgtatgggaacgtgaaccgaaagaaaaagaaagacggaaccttatataaagattatttctattatgcctgtaaacatcgtcgtctggtagacggtcataaatgtggatatcgtaaacaatggagtgaggagaagattaacaatgcagtggaagaagttattcggaagctggtgaagaatcctaaatttgaagaagcaattctgaataaaattggttcaagaatagatacagaagaaatagaaaaagagattgacggattggaaaagcagcacaggcagctgaccggagcaaaagcaagacttggacagcagatggacagtctggatattatggataaattttatgagaagaaatatcaggatatggagacaaggttataccgtctgtacgatgagatcgaaggcgtggagaacagtatagaggaagttaagaaccgcctgctgaatatccagcaacagaaaatatcagaagaaaacgtctatcaatttcttttatattttgataaactatatgataagttcaccgacctggagaagaaagaatttcttaacagttttgtagaacaggtggacatttatgagcaggagcagccagatggcagattcctgaagcacataaagtttcgttttccggtgtattttggagacagggagacacaggaactttgttgggacaacgaaagtaccgttgaaactgtcgttttattggagagaaaataggcggttttgaccatttaacaaatcatgaaaattgacctataatatgtttaacaaggcagccggaaggagaatacagatatgtcaaatgaatcaagagataagcatgagaaaatgatagaacaggtcgctgcgacaatggctattgaagatatgccattgtcacaagcctgctatgagaatttaagggctatggcatccggcgaaaagacacgtgaacagattacaaaagaaatcactgaaaaatataaaaagcgtcgttgatttctaatcagccctttgttatcaaaccgccagaatctgcagcagattacggataatggagttggcgtctcctcggatgccgtaatcacaatattgaaagattggcgaattcaggttggtgtttaccgcaatgatacattgactgtttttcatgccggattttattttatagatgaataagagattgggttactgttcaatggcctgataatcatcgccgagggtgatgcccagatcagaagcaatctgcggattgtaaatgcgtgtcagactctgagggtcttcaacaggcatttcggccggattcttgccgtttacaaggatgtcataggcctgttcaccggcacggtagccgatatcatagaaatcgatggagagagaggcaaggccgcagcctgtacactggctttcttcaccacagatgatcggtacgcctgcaggacgggcaacagcgtcgataatggactggttgctggatacaacattatccgttggtacgtagatcacatcgcattcagaaacacaattgttggtcacggcctgcaggtcattggaatctgaaaaactgaaatccttgtgcttaatattcagattatccagataagcggcgatatgttctgcctggtaaacggagttgacttcggctgaacaatagaggataccgacctgttttacatccgggaaaaggtcagcaatgatctgtgcctgctgatcaagcggtgcaagatcgttggtaccggtgacattgatgcctgtgcagccattcgcatccagctcaatatccagtgcagcggcgaaacttgtgacagatgtgccgacaacaggaattgttgatgtggcattcgagcaggcctgaagggcagctgttgcattggccatgatcaaatcaacaccgccgttgacaaactggttggcaatggttgcacatgtctgggagtcaccctgggcgttctgaacattgaatgcaacatgattttctccgagcagctttaccaatgcatcttcgaatccctgtgtagctctgtccagtgcatcgtgctggacgagctggcagataccaatctgatagactttgccgtcggctgcggtactgtcggaagcagtttcggctgcggctgttgaagtgttttctgcagctgattcagtggttgtatttgctacggatgagttggtgttggagctgcagcctgccaggcaacccatagccaaagttgcacaggcaatggcagataacatttttctaattccctttttcattcatttcctccttgtacgtaacttctgaatcgtgatgtgaagattacgattgactttccttcttaaaaatataaacataactgccagtttaaagcgttgcgctttaaattgataaattgaattataacattatttacgcaacaattcaacagggaaatcatttgaaattaagttagttgtatgataggctgcaattataaaaagtacataaagagtgtaaaatatttaaaacacattgtgtagtatacaaaagtgcgatataatagacgtaagatgtaatattttaaagagcgaatcagagacatacaaggctatatttgtctgcggatgtgcgtgatttgaggaggaaaatgagattatgacagagtgccaacagaagattaaagaattaagagaaataacagggatgaacagaagacagttttgtgaggcatttgagattccttacaggacagtcactgagtgggagcgcggaacgagaaatgcgccaaaatatgttctgaagtttatggagtattatattcagaatgaaaaagtgaagaaagaaaatgaacaggaagtttcggagaactaagtcggttttgaaggcgttagtagccggaattaagaacaaggtgagataagaggagcctgtgcagcatatcaaagaaaatgctgtacaggctcctttttagccgataccacccagtgcgataccgagaatcaaaaccagaaaacaaatcggaatgtaaatgtatttgcaaattgggaagaacagcccggtaaaaggcttttcacggccggtgttgacctgcttttctacatattttttgccaaggacccagaagaacataatgcctgccagacctgcaccaagagggcagatgtaaatggacagtacatccatccagtcggagacaatgccctggatcagcatggaaacgacgatgccgatggctgcgataacgagacaggatgcttttcttccgaggccggttttctcctgaacggtggcgataggagcctcatacaggttcatcagagaggtcataccggccaaaaagacagccgcaaagaagataatagcaattattcttccgccgggcatggctttgatcagatgaggcaggtagatgaataataatccgggaccgccctgatcgagctgtgcacctgtggtggccatggcagggataatgaccatggcagccagcatagcggcgatggtatcaaaaaaagcaactctggctgcggaagctgggacgtcttccgtatccggaagataggaaccgtagatcagagtaccatttcctgctacagacagagagaagaatgcctggccaagagcaaaaatccatgtgactggatcggacagtgcctttggatcgactctgaaaatataatggtatccatcgacggcaccgggttgaaaagcaacataaatgccgagaatgatgaacaggacaaagaaaacaggcatcatgatcttgttggctttctcaatgccgctgccgacaccgaacatcagaatgatcatgcagatcactaaagcggcggtctgccagaaattattgccgaaggaagaggccattgagccgaaagcaccggcaaagccatcaatatcggcaggggccagaacagcaccggtaaaagtcccgatggtatacttcaaaatccagcccatgacaacggtgtagccaatagccatggccagtgcgccaagaaccggaatccatcctaaggcttctcctgccttgcgatgtcctctggattcacaggcaatgccgaaggcgtcgatagggccggaacgggtggcacggccaaaactcatttcactgataacacccgtaaagccgatcaggatgacaaagataaaataagggataaggaaagccccgcctccgtagagagagacgcgggttggaaacatccagatattgcccatgccgactgcagaaccgatacaggccagtataaagccccatcggctgttaaaagattctctttttctcatattatatcctttcaagcgtttcgtttatttaattcataaaaaacatgtaactgttcagagtcaagcaaaatttcaaaaaacaggtataaaatgcgtagcattttggaggttagctttgaacagttacaaaaatattactatgttttgatggaaaactcaagttttgaatatgaatatctatcataaatatacagccggagatatcaaagggactcttgaggctcagtataaactgaatccggttcgtctggccatggatgctgcaagcttcccagtggcagcaaaagacatggcgcgtatgagaggcagaaaagtcggggcaccttatttgccgaataagctcacaggaccgggaaaagcttttgataagatgcattctgaaatgaaaaaagcgacaaaatcaagaaattgtcatgacatctgatttttattttatgttagaatatatcgcagaacaaacaggttgaataggaaaaacaataagtgatatagaataaataatggagattgatgacaatgagtaagattggcttggtattggaaggcggcggcatgaaatgtgcctataccgccggaattctggatgccatgatggataatggcgtcacttttgattattgtatcggtgtttcagccggttcggccaatggggtttcttttgtagccggacagcggggcagaaatatccgcttttacacagagcatattaatgagaagggctactttggtctttcttcttttttgaagacgggtaatcttttcgggctccagtatatatatggaacactgaccaattccggtggcgcagatccgctggattttgatgcctttatgaaaagtccgatggaatactggctggtggcaacggatgctcagacaggcaagccaacttatttcagtaagaaagatatgcataaggatgattatcgtcatgtgatggcatcctgtgcgattcctgcagcctgcaggcctgttgagatcgatggaagattttactacgatggcggtgtgtcggattctattcctgttcagaaagccatggatgacggctgtgacaagctggttgtcattttgaccaagccccatgattttgtgaaggagccggagagagatcggtttatttacaagagattatgcagaaagtatccgaagatcatcgaagcactggatcacagacatatcatgtacaaagcctgccaggataaaatgtttgcgttggaaaagtcaggtaaagtatttgtttttgcaccggaacacgtactaggcggcggcacttacagcatggatgccaaggaggaagaggctatttatgagatgggcgtcagggatttttatgtacagcaggaaaaactgaaggcttttatgaagtaaatgttgtagagtaaagctttacccatgagagcgccatattcaaattcactgccagagtgcagtcaaatcaaatattaagggaaggatttaaaatgagtctattcttcgctggcagtgagagcggcctgtgaagaatagactcattttgaatccttttattaaactatgggatcgtactcgtcttactttttgaaagcactcaaatcgatcattcgatggacaagggagctgtatttatcgtaaaatgtctgcaggctttctgcatcgtagtggctgcagtaatcggcgtttttcagatcgtccaggtaactgctgatcctctggatcagctggtcagagaggacagaataaaagtaagggccgacgtctgtatgatagcgccccggattcttcaggaacagctttttacgattgttgaaaatggagaattgtatcatctgttgtttgttgactaattgttcgtcatcgacaacatagaattggatattccgattctttttggaaagagccagtacattctcgatgtgcagcttgcgctcttccggtgtcatatgataaatcacatctgcgaaaataatctcaccatcatcaatatacttcattaaagaggatttcagtacatagaaatccaatgtattcttctcaaaaatctcttcccatgtgatttgaagctgagccacaataagggccataaattcatcatgataatcttctttggcaacgttgatgatcttatcccagcattcctgaggcagcagatattcaaagccaagcgtcaggaggaactggaagttgtccttggtataaaagtctgtacgataaccgtgctggtagaattcaagctgttctgttgcatgggccagaagatctgatgtacggaaagcgggcaacgtgcggacatagatctgattcactttctcaggatcgaagatcacactggctacattgacacgattgtattggtcaagggcacagataatggctacgcggtccttcactacaatggtattcaatgtgtgcatgagggtgttgtcataaaaatcaaaggaaatggcacggtttgcattgataaaatagtaaagggctttgagtccgtcattgttgtcggcatagagaagatctgtgtcaataccgattttcacattgaccgggtgcttggctgtcagatgggagtaggcattggaaggtctgtccatggcaaagcgacagacatccagtgtgcataagacatccagagtatcatcataattcagaagcatctgcggcagttcatgatcaaagaaattgtaaatatcattggccagcgtcagaatgcgcggtttataggtggtctgctgcttcaattccgtggaagcttcactgctggagctgctgtagttctcctttaataaagtatagatggtgttctcgagattgtccggacagacttctgttgaaaaagtcttttcaaaatctcccagaatttcctggctcaaaatctcctgagcaaaaagtgaagccatgcttctgttgatctccggggccatcttggcagcgggcagcatggatttgttgcaccatttgcttatgtaagatacgtcataaccaatcacatctgaaattgtggacagtttcgaaccagtcagctggatcagctgctttaatacagttccatatgcattcataataatacccctttgttatctatcaaattcaatagcacattgcttgcatacaatcgttgtatatagcttagtatgccaacatgttatgaaattgtcaagtaaaaaattgaatcaactagaattcaatttgcaaaacttgagtaaagcacacacaaattgattttattgcttcaaagctgataaaaacttacaatagacccatcgaaagaaagaaaaaaatgtataaaatcgacaacaattaacaaacttgatggagggattcgagatgggtaaagttaaagtcttaacagcgagacaggccgctgatctgatcaaagatggcgacacagtgactttaagcggattcgttgcaaatggtattgcagaagctttgaatgcagcagctgaggagagatttcttgagacaggacatccaaaggatctgacattattctgggtagccggtacaggcaacaaggatggcagtcacgccgatcattatgcccatgaaggcatggtcaagaaagttatcggcggacatttcaattttgttcctaagatctgcgaaatgctttcagagaataaaatcgaaggctacaatgttccacagggtgccattgctcagatgctcagagataatgcagcacacaaagtaggaaccatcagccacgttggtatcggcacatttgcagatccaagaaacggcggcggacgtttaagtgagaagacaaaagaagatatcgttaaggtcatcgaactggaaggtcaggaacagttattctatcctagaattcctctggatgtggcttttatccgcggtacatatgctgatgagttaggtaacatcactttagaaaaagaaatggctcctctggatgcaacatctcaggcaatggctgttcacaacaatggcggtctggttgttgttcaggttgaaagagttgtcaaagcaggtcatcttgatccgaagcttgtaaagattcctggtatttatgtagatgctgttgttgaatgtccggcagatgatccgaaacagtcacagagtatcaactgtacatatgatccggcttatgcaggtaacacacaggtacctgtatccagccttgaaccaaagaaactggatgccaagaagatcatcggccgccgtgcagcaatggaattaaagaaaaacgttgttgttaaccttggtgttggtgttcctgaatgggtatcttctgtagcagctgaagaaggcgtagcagatgaaatgacattgactgtcgagtgtggtcctgtcggcggtgtacctggtggcggcctcagatttggtggttctgtcaatgcacaggcttacatggatgaaggttaccagttcgacttctacgatggcggcggtttggatctttgcttccttggtcttgcagaagtcgataacaacggtgatgtgaatgtcagccgtctcggaacaagaatcacaggcagcggcggtttcactaatatttcttctaactcaaagaaagctgttttctgcggtacatttacaaacggtgtgaagattcagacaggcgacggcaagctgacaatccttgaagaaggtaagaaacataaatttgtcaataaagtaactgaaatcacattctcaggtgtagttgccggaaaggcaggcaaagatgtcctttatgtgacagagcgtgcagtcttcgcattgaagacagatggtattcatctgatcgaagtagcacctggcatcgatgttcagacacaggttctcgatgaaatggattttgcaccgatcgttgaccgggatgcagatggcaatgtgaaattaatggatgccagaatcttcaaagatgaagtcatgggcatgacaattgagtaaaaacagttttttataaataatatcaaacagggaggatttattatcatggaaaacttatttgcaaacacaggaattggcaaacacattatcagaacacatcattggggtattgttttacctacattggaaaaagcagaagcttttatgaaaacatttggtcttcaggaagattacagaggccatgtaaaagcttatgatgcagatctgatcttcacaaaacacggcaacggtgtagacgcagttgaatttatcattccattatcaggcgttttgacagagttcaacaaaggtaaaggcggtatcgctcatgtagcttaccttgtagatgatatcaatgctgtttcagaagaagtcaaagccatgggttatgaacttcttgaaaaagaacctcaggaaggtacagaagatatcattgttaactttatccgtccaaaatatacacagggtattcttgtagaactgatccagcaggttggtgacatcaattacgatgcaacattcacaagccgctggggcaacgaaaaataattataagcgatgatgacaggaggaaatgtcagtgtacacattaggtattgatattggttccgcttccagtaaagcggtgatcttaaaggatggaacggatgttgtcgcatcagcagtcgttcaggtaggtacgggaacttcaggtccgggacgtgttctggaagaagttttcagtaatgtcgatttaacacaggaagacatggattatacagtggcaacaggttatggccgtttttctgtagaaaatgcagacaaacagctcagtgagattacctgccatgcaaagggaattttccaccttgtgccatctgcaagaaccatcattgatatcggcgggcaggacgctaaagccattcagttggatgcaaagggaaatatccagaaatttgtaatgaatgataaatgcgctgccggtacagggcgtttcctggatgtgatgtcaagagtattggaggttccccttgatcagatgggcaaagttcatttccaggcaaaggaatgggcacaggtcagcagtacatgtacggtatttgctgaatctgaagttatttcccagctgtccaagggactgccgagagaaagtattgtcgcaggtgttcatcagtctgtagccagtaaggcgtgttctttagcataccgtataggggttaaaaacgatgtggttatgtgcggtggtgttgcacaaaatgcaggcgttgtagacgcaattgagaaagagttaaagcagagtattattgttgcaccgcaccctcagatcacaggagctctcggagcggcactgatggcatacgaagaattaaagaaagcgaataaataaacccaatttaatggaaggaaggtaaaaatttatggaatttaatgcaatggaagccagcgcaaaagaatgtttggcatattatcaggcaaaactcgatgaagaagcatgggaggctaaaaagaacggtaagcttgtctgttggtcagcttctgtagctcctccagaattctgtgtagctatggatatcgctatggtttatcctgaaacacatgcagcaggtgcaggcgcaagaaaagcatctatggatcttcttgaagtagcagatgaaaaaggctataacattgatatctgctcatatgcacgtacaaacctcggttatatggaactgctgaaacaggaagctttaacaggtcagaaacctgaaaaacttgctaattccaaagcagcttatgttccgcttccagacctggttatcacatgtaacaacatctgtaatacactgctgaaatggtatgaaaaccttgcaaaggaactgaacattccatgtatcatcatcgatgttcctttcaaccatacaatgcctgtatcccgtcataacaaagagtacattgcagatcagtacagagcagccatcaaacagctggaagaaatcacaggcagagcatttgattatgataaattctttgcagttcaggaacaggtacagcgttctgtattctggtggaacaaagtagcaacatatgcacagcgtaaaccatctccactgaatggtttcgacctgttcaactacatggcactgatcgtttgcgcaagagcaagagattatgctgaaattacattccacaaatttgctgatgaattggaagcaaaggatgctgccggtcagtacgcattcggtgcaccggaaaatgaaaagcatcgtgttacatgggaaggtatcgctgtatggacttaccttggtgcaacattcaagggcttaaagaatcagggtgctgttatgacaggttctgcttacccaggcctctggagcctcgtttacacaccaggtgatcttgaatccatggctgaagcttatacaaatgtttatatcaatacatgcggtcctaacagatacgaagaattctacaaagttgttaagaactccaagagtgacggtatcgttctccatctgaacagaagctgtaaactgatgggtctgttaaataatgaaggcgcagaatatgtcaatgcaaaactgggtgtaccatatgtcagcttcgacggtgaccagacagatcctcgtgtcttcacaccagctcagtatgagacacgtgttcaggcattaacagagatgatggacgaaaatcagtaatcagaggaggaatatataagatgagaacagcgaaagagatcattaatgagtttaaagcaattgctgacaatcctagaaaagcaatggatgactataaaaaagaaaccggtaaaggtgcagtaggtatcatgcctgtatactgtccagaagaaatcgtacatgcagcaggctatctgccaatcggtatgtggggtgcacagaagaaacagatttcaaaagcacgtacttatctgcctccatttgcatgctccattatgcagtctgtcatggaattacagttagaaggtgtttatgatgacctggaagcagtcatcttctctgtaccatgtgatacattaaaatgtatgagccagaaatggaaccgtccggtacctgctatcgtatttacacatcctcagaaccgtaagatcgcaaaggatgcagcgaatgtatttgctcgtgaagagttcaatattgttaaagagaaactggaagacatccttgatgttcatatttctaataaagcaatcaaaaacagtattgcagtttacaatgaaaacagagcagcttgccgtgaattctctgatgtagcagcagaatatgcagcagttgttacaccatccgacagacatgcagttatcaaagcacgttggttcatggagaaatcccgtcatacagcacttgttaaagaactgatcgcagctctgaaagctgaaccagctcctgaattcaagggtaagaagattatcgttacaggtattcaggttgagccatatgatgtgcttgatatcttccaggaaaatggttttgctattgtagcagatgatcttgctcaggaaacacgtaacttccgtcaggatgttcctgatgatgacgatgcactgatggcactggcaagagcttggaatgaatttgatggatgttcactggcaacagatgccaataaaccaaagggtcagatgatcattgatgcagttaagaaatacggcgcagacgctgttgttgtatgcatgatgaaattctgtgatccggaagaatttgattatccgatccttcttcaggaattcgaggcagcaggagtgaaaaacctgtatatcgaggtagatcaggaatctacagcatttgaacaggttaaaacacgtattcagactttcgcagaaattctgtaataacaaaaacagagaggggtttacagtatgtttgcgatcatagcctttattccaattattgttacgattattgtcatggccggttttaactggcctgcaaaaatcgctctgcctctggcgtggctcattacagccgttgtatgcttcttcggatggcagatggattttattacaattgcagcacacaccgtatccggattccttacatctattgatacaatcgtcattattttgggtgcaattttaatcatgaacacgttgaaacattccgggggtatggatgttatcaaccatatgttcaccaacatcagcgatgacccacgcattcagttgattattatcggctttatgtttggcgcattcatagaaggtgccgcaggttttggtacacctgcagcactggctgcccctctgctgatcagtgtcggttttcctcctttatgtgccgccatggtggcacttgtactgaatagcacacctgtcccttttggtgctgtcggtacgccggccgctactgcatttaatatggtcagcggagaagtagcagaatcaggtatcgctaatggcgaggcctggaaacttggattgacaaaatgggttgctattccaagtgcaatcatttgtccaatcatcatttttgtagcaatgtgcatgatgtgtaaaatgtttggcaagacaaaatccatcaaaccggcactggaatgtattccatatattctgatgtcagcagtggctttctgtgtgccatatatcatctgtgcgatgttccttggaccggaattcccatcactgatcggtgcgctgatcgcattggtcatctgtattgtgacagctcgaaagggtattcttgttccaaagtcaaaatttgaattcccggcgcgttccgaatgggatgcagcatggaaatctgcaacagcagaagaaacagaacagacagaaactgaaaataaagttgtggaaagtaagatttcaccggtgatggcatgggtgccatacggactgatcgctatcatccttgttgtgacacgtattccacagctgggtattaaaggtattctgaatgtttctaccgcaccgtttgcggtgtcactcagccatatttttggtgtagaagttaactggagctttaaatgggcatggaatcctggcgttctgccattcatccttgttgcactgctgatcattcctcttcataagatgaaagcagagcaggtgaaagcggcatggaaagaaaccggacagatggtcggtggcgcagcgatcgccctgatgtttggtatcgcgatggtacagcttttcagaaactccggtgctcagttcaatcacagtggtatggacagtatgctgatcgttatggcaaatggtatggccgatctgtttggtaaggcttacattattgtatcaccactcatcggtgttatcggtgcctttatctcaggttcagcaactgtatcgaatacattattctcaacactgcagtttgcagcagcggttcgtcttggactgccggctatgttaattgtagctatgcaggttatgggcggtgccatgggtaacatggtttgcgtcaacaacatcgtttcagcatgcgcaacctgtggtacagtaggaactgaaggacgtctgatccgttccaacattgttccttgtctgatttatgctgttttgacgattttaatcctcggcggcatgatcatggctggtatcgacccggcagcagcacttcactaagtgcgcaattccctttagttaatttactggtacatcgttattgcgaaaacgatgtaccaggtcatatacttcctcgatatatgttttctgcaggtgatacctgcaaaccaccacattattaaaacataaaaagtcgtatccgttgctttaatgggatgaagcagggatgcggctttttatgtttaataatgcggcagtttgcttttaataagaatggctttatgatatactagttgtatttacagagagaaaggataatatccgattaatttcagccagattagctacggaatctgaaaggaggttatattatgaccaaaacattcattattaacaaaggacaaaagccatcaaaggaacaaattcgagaagtgatggaagcaaaaaaatatcccatagaaccagatgaagatgcacccgaattatcgcctgcaatgtataaggcttttaaaagcagtgtgattcagcggaatagaaagaaaaatgcttgataaaaagataattataatcaaaatagcagttcgagttttgaactgctattttcaacggtaaagcggaggataaaagcgtggtcgatacagttttgtttgacttggataatacattgttggacttcaataaagcagagaaaatggcagtggaacgaaccctgcgggaaatgggcgtgacgccggatgagagaatgttaatgcgttatagcgagttgaatctggcccagtggcatttgctggagcagggaaagattacaagatctcaggtgaaagtgcagcgctatgtgaatctgttccgggagtatcatatagaaggtgacccggcagaagctgcaaaagtttatgaagcctatcttgccattggtcactattatgtagaaggtgccgaggaacttctgaagcacctatctgaaaaatatcgtctttatatggttacaaatggaactctcagcgtacaaaaaggacgcatcaaaagtgccgggatgcgcccttactttaaagatatatttatatcagaagaaatcggttacgataaaccgggtaaagcctattttgactattgcttttcaagaatatcgaactttcacagagagaacaccgttattattggtgacagccttacctcagacatacagggtggcaaaaacgccggcatccggaccatctggtataatcctcatcagagtcagaatacttcagaaattcagccgaattacgaggttaatgagctttcagcgattgaagacttattggaaaaaatttagttttgcgttgatgttctacggcatagagaataagatttaaaaggcttgcgaaataaagatgaaaatggtagtatgatggagtggataagattgagtaaagaaaggaactgacagatgattcgtttacttgcattagatatggatggtacttgcctgaacgggcgcagccggatgacagaggagacaatccgtacaatacgtaaggctgcagatgcaggcatcatcatcgtgccgacgtcaggacgtccattgacgtgtctgccatatcagatgacgcaggagaaaggtttgtaccgatatacgatcacttctaatggtgcacaagttgtagacctggaagagaaaaagactcttttccggatgctgatgaaacgtgaacgagtggtacagtttctgagggaatgtgaagagttgaatgtggtccggatgacacatatacagcatcgttatgtgatggaaggaccattgatggaagtggcagggcgtattgtctatggcagagatgtggatggcatccgcagagtcaatgatatggaagcctttgtcgaaaagattcattatgatatagaagaagtacaggtctattttttctccggcagaacccgaagaaaggttgcggagatacttgaaggctatccggagttttcatcagcatttggcagcaaatatgtggagatatttgcgaagaacacttctaagggaaccgcattaaatgcattggcatcaaggcttggtattgctaaagaggaaattgcctgtatcggtgacagtgccaatgatctgccgatgtttgaagcggcaggattgaaaatcgccatgggcaatgcagtaccggaattgaagaagaaagccgacatagtcgcttattccaatcatattgatggtgcagcgaaggccattgagcaatacattttgtaatggcttatctttaggattgatttttggtcaaaacagataattatataaaatatgcgcatactaatagagcattcagaagggtgttatttgaatataacacttttggatgctctatttttcgtgctgcaggaggtccggtgagatttttcgcagcatggagatacattgcgtaccggaaaatgtatacgctgctcttgtgagcagtcattattttaaggagaaatgaggtatggaatatggaagaacagacattgcacattttaaatgaatgcagctcagggtgcaagatggccattcacagcatgcagcaggttttggagtatgtggaaaatgaaaagctggagcaggtgattatggcggcagaacgcaagcacaaggaaattgcagcacggacagcaaaggcgctgacatgttatggagaaaaaggaaagaagccgggagcggcggcggaaacatttgcttggcttacaacggaaatgaagatgttgatccgggatgacagcagtcagattgcaaagattatgaccaacggctgcaacatgggcattcagtccatcatggaagttttgaatgaaaacccggaggcggacagagagagcaaaaatattgccggggatctggtgaaggccgaggagcatttcgcggatgaattgaaggcatttctgtaactatttcagcgagacagcaaattaggcagggaagcaaattggacaggacatagaatcaggaagtcggatgaaagaaaagttagaggcattaaaacagaggtacgggaactgatagaagtctgaagattgttatactcttattagaaggtcagtgaatggtcaaaatgcagagccattcactggcagattgaaaggagtcaacaatgagaaaaggaagtaaagtaataaaaattaagtatgaagaagacagtatttttgtcggtgcagcctgggggagaaaaagaacaagatggggacgaaaaggagccagactgaccctggaagctatatcggattatttgaaaaaaggagctggtgtgcatagtgaggaggcttatctggacgaagtgaagtgtgatttgctgaggttgattcgcaaaagattatatcagcaggccttaaaggatggaaaagaaataaaggaatatgagtgcagctttgaaggggtcgtgatatggccgggaaaaaacaaatttatctgttttaattttggcgatggtgctgttttgggaaaaacagatcaaggacatataggcagtctgctgctatctgaaaaaagaatcaggaaactcccgcaattgacaatggatggagctgtttctgccgtcggactgaaaagaggtgtttggtcagcttatcatgagttgtatatactggaaggacgtcaggagcgatgggcgatgtccgtcagtgaggataaaatagaagaaggtgagaatccgctgcttttgtcgataaaagcctgttgacagaggcagaagcatgcagaaattgtgtacaacaggcggtgtttatgagataatagattttatcgaataaacggtaaaggagagagaaaaatgcctttgtatacagatatgattatggataattttgaggattatgccaaccaccatgaagatgacggtgtgatcaagcttcagaatatgccggaagatgcttctatggaacaatggggtgcgaagcttcaggaaatcgccgatgaatttatatgtgcaccgagatattttctgatgtgctggctggcatcctattgtctggataaggatttgctggatgatgaaacttacaccagagagtttcctgcttttacataccagagagaaggtggccggaagaaattcgggtttcagccggtttcgaaggaatatgcccagaacctggaagaggatgagagagatcagtatatcgatattttatcggaaattgcggccagtcattccggtgacaagaaagcggaatggagaggtgtattcaggacagcatttttatggcacaaaaagaagaaaaaaatgatttccaaagaggatggtttcaagattgcgcatggattggatatgagctatacgttgacggatttctttttgacccgtgtactggaaaatgatggttttgattttacgaagtcagcggatgttatccatgcctactgctgtttcagaagcaaatgttatcaggactttttagagttagaggccctttacgctgaggcagcaaagggtgttgctcaaggaacaatagaagaaaagccggaacattttacagaaggcatgctgcctggagatgaagaaggtgccggacggaatcaggacaactctttgtttggactggtagaaaagtggaaatccgaaaatattgaaatcgttgatgcagaaaaacatctggataatgtggacctgaagtttattgattggatgaaggagaaggcaccatttctggatttgccgggaaaaacagcatgtgagatttttaagagactgacagcgtttgtctatgcagacacggaagaaagacagcaaaagcttgagatacagcgtgaaaatggccaaaatgcttcagatgatgactgggatgatgaggagtcactggaagaggatgactgggataacgttgaacggaatattgtttcagatttaaaaggtgtatacagtgaaggaagtttgtgccagctgaatcagatggtgggtgaggctttcatcaaggaaatccagaaatgtctgaatgaattgtccggaaagctttataagaatcatccggaacgactggccagatatctgtctgtggatgccaatggtgaggtgaacattacggtgatcacaagccgactgccgctattattgtcaggaaaagcaaatgtgacaaaggcagatatgctgtttatgctatgggtggcttacaccttatatcagcgtgaaaccggagagccggaggccctcagcgacagagtatggagttttatggagctggccaatgatgtgctggagaaggcttttttgccggcattctacattccgcatattctggaacgttcatttttgatcagtttgtgtatgaatggacttgaaagtgaaaacgaggatattttctattttggtgagtctccttatgagatatatgctgcgatgtgtcagttttcagtctctgtaacaaaagcataacgaggtttatagaggtatgcgagactatttgaaagaaaaaacctttatccgttttcctggcggcgaatgttatgaaattttgggtatgatcggcgaaggtggttccggattaatttattctgcaggaaaagttgtcaggcagggtgaaaattatgtgaaggagaacagcctgcgctttgccctaaaagaatgttatcccatatccagacagtttaattttttgagaatgcagtcgggggaaattgtgccggagaatgaatcggaggttgccgccaattatctgcgctgtgtggcatccatgcagctgaatgaaggacagatgacatcggaaatttatgattcagaggccattcgattgataccgattcagcgaattgccagcagtgtggaaatttcctttgacaaaggacagcattttcattatgtgaataatgcctttacagtgatggcttccatggaaaataaaggagaatccattgcttcctggtatcaaaagaacggcagatatacgatggagatgatttttagagtcattcaggaaacgttatttgctgtgagagaagtgcatctggctggctatctgcatttggatctgcaggagggcaatatatttgtgaccggacagccgacggatgaaagtctgacctgttttctgctggatttcggctcagccagaaaaagactggcagatggactgtgtgcccctgtgggtgatcagccgattttctcatcagagggctatcgggcaccggagattgtaggaatcatgacaggtgaaacaccggatttcagattggggccggaagcggatttgtacagcataggttatctgcttttatatctgctgacaggacggcgttattcgacacgcatgctggaggatgtgcgaaagtcttatgatgggcattatcttaccagaaaaaatattcaggatatgaagtgcccgccccatgcggaagaaatcatacagcatattctggaaaaggcactggaaacagattcgaagaagcgttatcatacggccgaggaaatgttaaaggatgtatctgccgcgttgaatgcacttcggccttatcattcccagattgccggaatgaaatacgatgcttatattttgtaccggtcggataatattttacataaacatgtggccgttactttgcagaaattgctggagcattttcggacgccgggactgaagcggattcagcgggtttttcttgatgaaacggagttgtctgcggattatcaggcagacaaacaggtgatggatgccctgaaagccagccgatatctgattattatcggtcaggattcgtcaggtgatgatatctggcagtcaaaagaagtgaaattttttctgaaaacccataaaccttcagatgtactcacaattttggctgtacaaaatccgaaacagtcggaaatctcggagtcatcaaaagcggcagaagcatcaaatgtgtctggaacatcagaagtggcaggaatagcagcggtatcggagtatgcagttgttaaagtgggcggcagggatcgtaattttccgttggcagcggatatccggggcgcttctgagaaagaaattctgaagaagctgaagaaggatggctttttgagaattgcagcaccgattctttcagtgccttatgacggacttgtgcagcgttaccgaaaatataaactcagaaagagaatcacaatggcggcggtatgcctgtcagtggcagctgttttcacagtttatgcgctttatcagtcttatcagattgcattgcaggaaaccatcgccagaaggaataaagcacaaaatctgtgtgtgcaggctatggatcagtatgacagaggagataaagaggccgccattgattctgcactgcagatgaatgccgaggcaggggatacagaaaattatgtgatacctgaacaactatacacattgaatacggcactggatagctttgagtccggatatcgcatgcattactcgccacttcagaaggtaagcggggatttttcacaggtggctttttcaaagaacggcggcgaatacagttatgccattaatcaggagggagagttggaagtcttttctgcaaaggaagagaagatgatatggacgttggatacagcggctattcagtcttttgtggatgaaacgatagaaactgaggatggtattcaatttgttgaggcattagatacacatcgtgccattgtgtttattggaaaagacagtgttgtgaaggatgtgcatgcctatgcccttgtcattgatgcggacagcagaagtattatctcaggctttccgttggaagaacctattatcagctaccgaacagcggctgtctcctgcaatgagcgctatttggtttatgaagcttcaaagcttaagctctatgtgtacgatattgaaaaagggtctcaggttgaatgcattttggcagaaacaggtaataaagagtatcagtttacagatgtgtcgatttgtgaagacggaagtaaaattgcaattggaacggaaaaaagacttattgtatatgatatagagagtaagcagctgcaaacaattgccaatgttccgattggcaaagtggtatggacggataacagccatgtggcgtgcatgtcttatcagatccaacaggaatattttgcatccagtgacccatggagccgtgaaaaacgacagtatgcgatagaagtttatgatatcacaaatcagggagacgcagagactgagaatgagaaaacgacggcagatgcagttatgacagacttggcttttgatacggataccatgggcctgaaggtgattcatagaaatgtgacggatgaaaacggaaatacagaaacaaagacagcacttcttggttggatgcgaagcaatctttattttatcgatgcagagacaggaaaggcagaggatgtccttgcttttcagtcggatattgtatcgattcagagcaggacagattccgaagattctattttcgttgctttatatgatggcaaagtgatgcaggtgacaaccggcgaaacaatcggaaaacgaaaagcctatgaagtagacaatgaattggatggcttttcctatacatcagataagaagttgatgatgtatacagaagaaggaattgttctttgcggtttatcaaaagacggggagatggtacagcattcgttttcaagtgattcttcagatgacaggtttgtggacgctactggcagtatggaagaaatgcggctgtcatcaggagaggcctatcgattgatgtggctgaatgataccagcagggaagaaggtacgatcgtcaggcatgcgattgaagtgtacccgcttcattcagatgaattactgctgcattatgaatgtgaggatggcaataccattaagatggtaaaactcacagaaaatgataccggaacatttctgtgtgtgctggagctagcaaatgaccgaaatgatgaaacaacaggaaaaatcaaggtgttatccctggatgaggaaagcgaacagttctcctatgctctggatggacaggagggggtggatgcctcaggatggttatggatgacggacataatgcctgtgcaggatctatgtcatgccatgactttgaatcgtgacggtcagctttattgggtagattttgaaaaaggaaccgtggaaccgttatcatttgatgagaatgaatgtgagaaaatcctaagtatgtccatgagtccggatggcaggaagatattattgctgggggtgaagaaagattatctgcaattattgagttatgatgtgcaaaatcagcagatagatgctgatacaacctggcagtctgagccaacatcaaatccggagaatgcatttttagcggaaaacagtgatggatcacaggtggctgtttatgatggcaatgcggagtgttatcttattgagacagcgcatttgaaacagaaacaagttgttgacattgaaaatgccaagaatctgcagctcagtttttttgaaaatgatcagttcctgttaggggcagattcagagtgcatctggctgtatgatttggataagcatcaggttgtttcgagttatgcagtcagcatgagaaatcatgccatgcagttaacagctgatatctccggcagttatttcacattgaaggaaatatgggttacagagaacattcgacaggatgaggggatgagcaaacagaattgtcatatttatttcgtggatgaaagccatcagatttatccttatgcagatgtggcctttggctatcggctgccggatgaagagatggtttaccagtttaacagtgacggttatgcggaacatccgctgtatacatttgcagatttatataaaaaagcacagaaagagtaaaaagtatctgctgaaatcggtccatgaaggcgtgattttggcagatacttttatatttagaatgaaacaatgtaaaccggattttgtccctgcatcaggtgataaggtccggccttttttgcgctgctgacctgaatttgaatgatctccggttcaggcagggccatttctttttgcagggccatgatctggccgatggtttccagagtgatggctgttatgacgactcgaatttctgagtttcggctgtataacagctgcagaatctctttcaggtgtccggcactgccgccgatgaaggcgtgggtggctgccggcagtgcgtcaagactttccggagcggtgccgctgacaatggtaaggttgtccgcctgtaatctcagactattttctttgatcaaatccagaccatcgggattgcgttcaatggcataaacacggccatcaggaatctgttgtgctgcttcaatggcaatggagccggttccggcgccgatgtcgaaaagaatagcgtttttcgtaagcttcagtttgctgagaacaacacttcgaatctcggattttgtcatcggaacctttcctcggataaaggcatcatcagaaagtccataagtaacaggaagcggttcagcatccgggttttcaatataaatcagggataatgccgaaaatgtctgttccagaaaatctgcagggctgccgctgataatctgttcatccggctgtttcagatcagcgccaatataaagatggacatttgaaaggccatagtctatcattttctgggaaatattcgcggcatcatctggtttgcccagcagagctagagttttggcgtggcgccgtacatggcttataacagaggctgtctggccgtgacaactgatcagatgaacatcggaccaggttttgccaatggtattcaggaaatggatcggtgaggaaataccgctgaacgcctcgattttgaaaggctgtccttcaagacagcgtcttagactggcggcaccgctgtaaaaaccgatatccccggagaataaaacggcaaagtgctgatattccgggtgcgacagcatgtaatctgtaatggccggataattataggaacaaaaggtgggtttgtgataatgttcagccatttggagcatccgtcctgcaccgataatgacatcacagctttttagtgtgcgatcggcttcgagtgttaattgatccgcacacatacctgtgccgatgagactgacggtctgctcagcagtggattcggatggggaagtgccgatccagtttgaaagccagtgataactttcagagagcgagagaccattttcacggacaggatgaccaatgatcaatacagggacctgtgcctgcgcagcggcctcaagtttctcgtcaaagccgccggtgcgtccgctctgtttggtgaccatataaaggggtgtttcagacaaattgctgtcaggatggtctttttcccagagtctgcagatatgctgaatggttgcggtattcatgccgacatcaaagggcccctgcatacagaagatgtgagaagcgggaagaccaagagacatacatgcggttaacatttcagcgtttggcagaatgcggacaaatacacgttcagaggcgttgtttatcttcataaaatccggcagtgtcttactgcctgttgtcagaaaaacaggaccttcctggtgattcaggcaatccacagcttctgccgttgtatcaacaaaaatttcagacggatggataggattggaggaagtgtcggcggatgtttggcagtcccggagaatccgcaggtaaggcacttgagtcctggtacatgcgccggagatattggcagaggcctctgacgcataaggatgggtagcgtccagtacaagatcaaaatgctgctgctgaataaaatcaatcatctgagcctcattcattctatgggaggaaaccgtcatggaaggggccgatggcagaagggatgcaccgtaggctgtcgccactgccgtatgcagtcggacgggctgatgaatcagaaattcagccagaagtcgaccttctgtggtgccggcaaaaagtaatatatttttcatagtaatctcctcgtcagtggatattttggaaatctacataaaaatcagtggatacaaggctatcatatcatagccggaaagcagtggcaatttatttccgtgtgcaggattcacaatgcagctaatttatagtagaatagggagtatgagtgccggttaggagcggacagccgcatgatcgtgttagaaccatgattgtgttagaacataggatgggaagagagaagagaaaacagaagaaaggatgggatgaataatgacagagatgaaaatgccgcgggtgatgattgcggcgcccgggagcggaagtgggaaaacgatgatcacctgcggacttttggagcttttacgcagggctggccgtccgatatcctttaaatgcgggcctgattatatcgatcccatgtttcatcgatttgtcctgaatattccctccagaaatctggataccttttttacagtgccggatcggacaagaagtctgatggggaaggcatgtatgaaagagggggcggatctggctgtcatcgaaggagttatgggatattatgacggacttggcggtgtttctgtcagaggcagcagctatgaactgtccgtgcagaccgggacgccggtgatccttgtggtcaatggccgggggatgagtctttcaatcgcggcattgattcggggatttatggacatgtatccggatcagatgattcgcggggtgattctgaaccgtgtatcaaagggtgtctgtgagcgcctgacacctattattgaagaaaaactgggtatagctgttattgggtatgtgcccgaaacagaggtgatctgttttccaagccgtcatctgggactgatgatgccggaggaaattgtgtcccttcgggaacaaattcagaaatttgcaagtttgttggaagaaacattggatattagaaagttaaagacgattgcagaggcagcagagcccttgaattggaaggaagatccaatgcatgttcaacggctggaagatgcgggttcgggcaaattgcgtattggtgtggccatggatgcggcattttgcttttactatgaagataatctggatttcctgcgggaacttggtgcagagattgtttatttttcccctttgacagacgccgctctgccggagaatctgtcgggactctatatgggtggcggatatccggaacttcacggagagcagctgtcacagaatgcatctatgaaacaatctattcgggaggctgttgagggcggtatgccgtgtttggcagagtgcggggcttttatgtatcttcatgaggcgatggaagatgcggatggaaggttctggccgatggtgggactggtgccggggaaggctgttaagaagggacgtctggtacgttttggttatgccgttctgacatctgaaacagacacgattctgggaccgaaagggctgcagatgccggtgcatgaatttcattattgggatacgacctgtgaagaaggctgctttgaagcccataagccgttgacagaacgcagatggcattgcatgtatcagaagaaacagctgctggcaggatttccgcatttttattttcaggccgatgaggaaatggcccttcattatgtagaagcatgcagaaattatgccgatggttatctatgagaacaggaaatgaggaacgaaaagtggaagatataaaatttttaaaagcacaattgaatcaacagttatttatgatcagccagccaaacgagaaagtgatggaagcggcatggcagcgatgggacagcatcggcaaaccattaagaagtcttggggcactggaacgtgcggttgtgaaaatggcaggtatggagaatacggtgaatgtcaaaatggacaaacgtgccatcgtcgtactgtgcggcgatcatggtgttgtgaaagaaggggtgacccagacagacagcagtgtgacaaagattgtggcggataatattgcctcaggcaaggcgagtattaacattatggcaggaaaagccggagcagatgtatttcctgtagatgtgggaatgatgggtgaacattatccgaataaagaatttcaaccgatggtcatgtgtgaccgcaaagtagcccagggaacgggcgatattgctgtggaaccggccatgactcaggaacagtgtcttcgggcgattctggcaggcattgaagttgtggccgatctttccacacaggggtatgagatgatcggcatgggagaaatgggaatcggcaataccacaccaagcagtgccctggtgtcagtccttttgaatcttccggcggaggaagtgacaggacgtggggcaggattgtcggatgtatcctacaataaaaaagttgctgttatcgaacaggcggtgaagcgttattggaaagcaacagaggattctgaaatcccagatggcccgtttttcaaaatagatgcggcggttgaactgatgtcacatctgggcggctatgaaatcgcagccatggccggtatgtgtctgggcggtgctgtctttggtgtaccgattgtactggacggctatatttccgtggcaggtgccctgtgtgcttctttgatcaatgcagactgcacggcataccttctggcatctcacatttcagcggaaccggcagcatggaaagtactgagaaatctgcatcttgaaccggtgatccaggcaggaatgtgtctgggggaaggaaccggtgcggctgcagccatggttttatatgatatggggcttgcggtatatcgtcagatggagacttttgatgatattcatgtggaaccgtatgaaaattacgcaaaaagacaggcggatgagtaaatgatattactggtaacaggcggaagcgccagcggcaaatcagaatatgcggaaaacagagcgctgcagctggccaaaacagagcagaaaaagctgatttatctggcggcaatgaagccctttggagaggaagcagcaaaaagaattgagcggcaccggcaattgagggcaggaaaaggttttgaaacagtggaacgttatacagatattgaaggtctttgcagggatgaaagtttggaggcaaaaactttcagacagaaggcaaaggatgcggtggtactgttggaatgtatgtctaatctggcggccaacgagatgttttccggcagtgacagcgatgcggattgtaccggagagttcgaggctatggatatccgcagggtcaaagacagaattctgagaggcatagatgctttgtctgaagtgtctgatcatttggtcattgtcagcatcaacgtctttgaagagggcatgcagcagtatgatgcatggacccgggcttatatgcagtgtctgggagaattgaatcaggcattgacaaggaaagctgatatggcggttgaggttgtttactcgatccctgttccttataaggagggtgtgacatgcaatctttaattattgcatttgccatgtattcgaagataccaatgccacgggcagactggaatgacaaaaatatgcgctatgccttttgttggtttccggtgatcggtctggtgatcggcctggtggagctggctgtcttttatattttgacaaaatggcaggcgggatctgttttcagaggcgtttgcctgatggcggtgcctttattggtgacaggcggcattcatctggatggatttatggatacaacggatgccagaagttcttatggagacagagagaaaaagctggcaattttaaaggattcccatgtgggggcctttgcggtgatcggttgcagcttttatctgattttgtcggccggggcctggagtgaaatagatgcaaagggaattgttgtgatggcgatggcttttgttctggaacgggcattcagcggatttgcggcggttaacttcaaaggcgcacgcaaagacggaatgctgaccgctttcagagaaccggccaggaaaaggacagttactgtggtgttggcggcggaggctgttatttcgacaattgtgatgtgttatctctggcttccggtgggactgttatgcagtctgggagccgttttgacatttgtttattattataaaatggcgatgaaggaattcggcggcacaaccggagatctggcaggatggtttctgcagacctgtgaactggtgatgctgatgctgactgttgttggaaaaatgattttggcataatatagtcaatacaagaggagaaggatatgatatttgtaacaggcggctgttttcagggaaaacagcagtgggtgcttcaaaattgtcaggtgcagccattccgggtggcagatggggcagtctgcagtatggaagcaatcaaaagtgccggtgtactggatcattttcatttgctggtgcgccgttggatgcaggcaggcaaaataccggcggatgagacggaaaagattctgtcagataatccggatattgtgatcatcacggatgaaatcggcagcgggattgtgcctttggatataaaagaacgtgaatggcgggaagtacacggcagaatctgctgtcagctggcaggaagagccgatgctgtttttcgcgtcatcgccggcatcgggcaaaaaataaagtgaggcagcagggataaatgaagataaaaatatggctgatccggcatggcatgacggcaggcaataggcagcagcgctatgtgggaacaacagatgagctgctctgtgaagaaggacgacagcaaataatattgaaaaggcagttgataaagtcggatcaggatattcagaatgtttatgtcagtccgatgctcagatgccgggaaacggccgaaattctgtttccggcggtcagtcagataacagaagcgggttttcgggagtgcagtttcggagaatttgaatacagaaattatcaggaactcaatgggcatccggattatcaggcatggatagacagcggcggcactattggtttccccggcggtgaagatcaaaaagccttttgcgacagagtacagacggcttttgaagcatgtatcagggatgatgtgatgccaaaagctcgtaattggggacagacatatgcaggtcaaaatgccgcagaaaaagaatttacgacagccatggttgtccatggcgggaccatcatggccattctttctaaatgggcaatgccgcatcaggattattttcattggcaggtcaaaaacggctgcggatatctggtttgtttggatacagatgaatggctggcggaaaaaggcagtttgtctgtgattgagaagttttaaaggctgtggaaaaggcaggtttttaaagtgaagatttggtaaaaggagaaaatgtatgcatggcatcattgttttggtgggaggttttttgctggattgtcttttaggtgatccgcataatccatggcatcccatttgtctgatcggctatctgatcagttttctggaaaagaaaatacggaaactttttcccaagcagcccaaaggcgaattttacggtggacttgtgatggttgctttagttttattcatatctacagccgttccgatagtgcttctgaaagctgcgaagtggatacatccgtatctggcacttgtgcttgaaattatcatgtgttatcagctgttggcggcccggtctttgagagatgagagtatgaaggtgtatcatgcacttcatcagcatgatattgaaggagcaagaaaggctgtgtcgatgatcgtcggccgggatacacagcggctggatgcagcaggcattgcaaaagcagctgttgaaacagtcgctgagaatgcctctgacggggtgatcgcaccgatgatttttatagctattggcggtgttccactcggctttttctataaagcagtgaatacaatggactccatggtggggtataaaaatgagaaatatctttatttcggccgggcggcagcaaagctggatgatgtgatgaattatgtgccttcaagaatttccgggcttttgatggttgcatctgctgcattgaccggcggtgatgccaaaagggcatggcacatcttttgccgtgacaggtataatcatgccagcccgaattctgcgcagacagaggcggcttgtgccggggcacttggccttcagctggcgggagacgcatggtattttggcgagcgctatcataaaccgacgattggagatgcggtgagagagattgaagatgcagatatcatcagagctaattgtctgatgtatggtgcagccatgttatgtcttgtgatctgtgtgattattcgctatttgctggtgggatagtgtacagcaggaaaaagacagaaactttcggatgaggtatgagcgcgtggatgcaggcgaaagattgatcagaaagccgataatggcgacaggaacaggagaagaaacgatggcaaaagttatcatggtacagggcaccatgtctaatgcgggaaagagtctgcttgtggctggattatgccgtattttcaggcaggacggatacagggtggctccatttaaatctcagaatatggccctgaattcatttattacaacagaaggtctggagatgggaagagcccaggtgatgcaggcggaggcggcaggcatcgaaccgtcggtcaggatgaatccgattcttctgaaacctacatcagatgtggggtctcaggtgatcgtcaatggtgaagtgcgtcagaatatgcgggcagcggaatattttaaatataaaaagtcactgataccggatattatggcggcgtacaattcgctggcagcagagaatgatattatcgtggtggaaggtgcaggaagtccggcagagatcaacttgaaatccgaggacattgtgaatatgggattggccaaaatgctgaaagcaccggtattgcttgcaggagatattgacagaggtggtgtatttgcacagcttgtgggtaccatgatgctgcttgacaaggaagaacagcagatggtcaaaggcttgatcatcaataaattccggggagataagcgtattttggatccggggatcgagatgttgaaagactatacgccggtgccggttgtaggggttgtaccgtatatgcatgtggatattgacgatgaagacagcctggcagaccgtctggacaaacataccgaaaaaggattaatcgatatagcggtgatccgtgtgccgagaatgtcgaattttacggacttcaatgcactggaacgcatgcagggcgtaacactgcgttatgtggaaaaggtgcagcagatcagccgtccggatctgatcctgcttccagggaccaagaataccatgggggatctgaagtggctgcgtatgaacggtctggaggcttcggttttgaaattggcagcggaaggtacgctggtgatgggcatttgcggcggttatcagatgcttggtctgacgctggaagacccagatggcgtggaggaaggcggcagtatgcgcggcatggaattgctgccggtacatacggtgtttgagaaggccaagacgagaaccagagtttccggaaagacgggaacattacatggaccgtggcagttgttatccggcacggcttttgaaggctatgagattcatatgggtgagacaacctatgaacctgggggcactgtattttctgcaatagcagaaacagtcggtacgcagcatgttgatgaagcgatggctaacggctgccagtatcagaatgcggccggaagctatgtgcatggtctttttgactctgtggagatgcagaaagcactgcttaggctgctttgtcagaagaaagggctgccggaggaagcggtatcctggattgatgagaaagtctataaagagcagcagtatgataaactggcagaagggctcagggagaatatggatatggcaaagatttatcagatattggaggagggactggcatgaagatagaacttgagaatgtattgccggcagagattgagaagcgcagttttgagatcatcacagaagaactgggagaccgggtatttgatccgcttcaggagccgattattaagcgggccattcataccagtgcggattttgaatatgctgattcgctgtgcttttctgagcatgcggtggagaaagcgttggatgcgctgcgcaaaggggcttatatcgtgactgatacacagatggggaaatcaggcatcaacaagaaagtgatggcagaatttggcggcgaggtctgctgttttatgtcggatccggatgtggcagagacagccaaaaagaacggtacaacccgggctgtagccagtatggaaaaggccgcaaagcttgacaggccgttggtttttgccatcggcaatgcgccgacagccttgattcagctctatgagatgattcaggagggccgtatccgaccggaactgatcattggtgtgcctgtgggctttgtcaatgtggtacaggccaaagaactgattatgacggcgggtgtaccgtatattgttgcaaggggcagaaagggcggaagcaatattgccgccgccatctgcaatgcgcttttatatatgctggacagttccagaggacagcgctaaaagaataaaaatcaatcgtaaggggtcgcttttggcggcctctttttttcgaggaaactgccccgcatgacggccttgctgccatatttctgccggatgttgtccagggcctgatccagcttttcctgcttgtcattccggacataatcaaagagattcatctgacgaacctggcagtcactgagcttggaagtacggatgccgagaagccgcacgggggtaccgttccagagttcatgaaaaagctgcccggcagcttcatagatgacctgtgtggcctgggaaggtgagagaagctgcatttgatgagaaacattctcaaatgtgttgtagcggatttcaacgctgaccataccggccagaaaaccggctttgcgcagtcggccggcaacggattctgaaagttccagcagcactttgcgggcggcttcttctgtggtcacgtctgctgacagggttgtggaattgccgatgcctttgttggaggtatccgttttggtccgctcgtcaatgtggacagattcgataccgttggcgtattcccagatggtacggccatgacttttcagatgggcttctatgagtgccggatccattttggccagatcgccgatggttttgatacccagcagttccagttttgcagcggaagcgtggccgaccatgaagagatccctgactggaagaggccacattttcaccgggacttcttcggggaaaagggtgtgaactttgtccggtttttcaaaatcagaagccatctttgccagcaggcggttggtggagatgccgatattcacagtgaagcccaatctgtcacgaattgtatctttgattatatgggctgccctgacagggtcaccgctatctccggggatcgggacatattcggcaaaacattcatcaatactgtactgactgatggcggaagtataatgatgcagcagatcaagcagctgacgactgcactggctgtagtaatgatgttccggcggtacaatggtcagattggcacattttctcagggcatcggtgatcggttctccggtgcggatgccgtatctggctgcagctatggatttggccaggacaacgccatgccgtttggacatatcaccgcctacaatagccggaatcttccggagatctgtttcactgccgtcacggagcagtttgatggctgtccagcttaaataggcgctgttcacatctatatgaaaaataatttttttcatgataattttcaccttttttccacaattatagggtatgttatacgtaagatataagatgcttttgataaagttgatatttatctttattatataggaataaagattgtccgtccacgacatttttacgttgagattttgtacggccggtgttagaatggtggttgttgtaatagatgctgtatacacatgcatgcatcgaatttgaattttatagactgggagaaagactttaatgaaaaatattgtttttataggtatgccgggggctggaaagagtaccatcggcgtggtaatcgccaagattttcggatacgattttgtggattcggatcttctgatccagaatcaggagggagatattctggaacatttgattgagaagcatggaattgaaggctttttacagattgaaaaccaggtgaacagagatattaatgtgaagaaaacggttatttcaacaggaggcagtgtctgctattgcgatgaggccctgaaacatatgtcagagcatggcgttattgtttatatcaaaacagattatgaatcattgcatcagcgcttgggcgaccttcatcagagaggtgttgtgattcgaaacggatcgacacttttggatttatataatgaaagaacgcctctttatgaaaagtatgcagatgtcgttgcagatgtcagcggatgtcggattgaaaaggccattgataagataaaaaatttactgaaagcctgtgcaaaattatatgaagaatagaatatcaaaaaagagacataacagttacagaaagagggagagaaatttcagagattggccaaagaatccgcatttttacggtgcgctggcgatgcttctgccgttgacggcgatactgatcgcttatattgccatgggcgttttccctttcggcaatcaggcaacgatgatcattgactcttatcatcagtatgtaccgtttttctctgaatttcatgataagatctggcatggtgaaagtttcctttattcatggcacggcagtctgggatttaattttatagcggttcaggcttattatctggcaagtccgctgaattttctgattgccttgttcccggcctcgatgatgatagaggcctttgagacgctgatcgtgctgaagatctgtctgtcaggatggacggcttatcgctatctgcggagaagaaccggaagaaatgattattcgacggttgtgtttgcatcgttttatgcccttggtggattcagcatcgcttataactggaatgtgatgtggctggacagcattgtcctgtttccgatcattcttatgggtgttgagaagctgatcaatgacagagacggtcggatgtatgcagtcagtatgggacttgctattttctgcaattactatatggccattatgatctgcatttttgttgttttgtacttttttgttatctggttttccagaaagcgagaaggcatcagacagtttctcagaagcggtattcattttgtgctgtgctctgtgttggcgggcggaatggcggccatttatctttttccgacgtattatacattgatcaacagttcccagggatcggccccgacaagctttaagatctacaggaatttcctggagatttttcgtcagcagtttgcactggttgaaccgacgcagctgacaggggcgccgaatatatactgtggcgttctgcttgtgatgctggttgttttttatgcggtttccaaaacgattccattaagggaaaagatcggacgtctttttgtaacaggatttgttctggtgagtctgaatattaatgtgcttgattatgtatggcacggattccatttcccgaataacctgcccggcagattctcttttatttatattttcatggtggttgttatggcctacgatgcatggcagtcactgcggctgacgaataagaaggttttctttgggatttttgcggcagaagcggtgctatttggtgtatgtctctggtatccgaaggatcgtctgcccctttacagtatgattgtgacaggggtgctgatggcactttacatgatcctgctgatcgcccatcggagacatgcttcattgacgattaaaggcattaaggtcctgccaaagtatctgtgtctgatggtactgacagtggaagtggcgggcaatgctatttttggcctgtgtatgaacggaaccaccaaccggacgaactatacagaggacaggcaggaggttgcagatatccgcagccgctacgaggcaaaagatactttttacagaatggaactggaacagatcagaggcagggatgatgtcacatggcatcatctgaatggtctttcattcttctcatcaacagcggatgatcgtgaggagaagttgatgggagctctcggtttttacaacagcggcaataaatacagctataaaggggcaacgcctctgacagatgcgatgtttggtatccgttatattatcagcaatgatgaaatatgggcgtcgaatctgtcattatgtgagcagacagagaataagtatatttatgagaaccaacagaatcttgctcttggttacatggtgaatccgggggttacccagtggaagatcgtggaaggggatccttttgtcacccagaatgattttgtgagaatggcaacggatactcagggagcgatgtttatcccgcttgaaacgggagagccgcaggtgacagatggcatgttgaccagtaccggtgaggataaatattattatgagcggcatggcagcggcggaagcctgacctggcagctgactttcacggagcagcaggatgtgtatatttattttgaggccagtcattgtgagaagctgaaggtgacgattgacggaaagacggagacctattctgataagcggggacatattgtgcatcttgggcagtgtgatgcagggaaggttgtgacattggattttccgatggacagcgaatatgaaacaggtaacgtgaaactgcagatgtatgccctcaatcaggatattttcgattcagcctatgcccagctggcggatgaacagctgcaggtgacaaattacgacagcacccacgtcaacggacatattcaggtgaatcaggatggtatgatgctgctgtcgattccttatgacgaaggctggcatatctatgtggatggtgaagaaacagagatacagccgttgggtgaagcgatgacaggatgctggatgacagcaggcgaacatcagattacgatgcggtacacaccacagggatttgtggaaggagccgcgatcagtgttatttcactactgatacttgtgttgggaattgctggaaaagcaggtcttttcagcagacatcataggaaaatgtaacaaattcttaacaaatttttataaaaagataaaaagcgatttacaaacagagagtttgtgatataatcattttgaggaaaaatcagtatagggattttttgtcgatttttataggaataatagttgatcagcgagtgatgtattgcatgattcgctgattttcggatattgaatcagatagatgagaacaacgcaatataatttgaggtgcaatatggaacagtatttaataaaaggcgggaatccgttggttggcgaagtagagattggcggagcaaagaattcggcccttggtattttggcagcagcgatcatgtgtgatgagactgtgacaattcggaacttgccggatgtgaatgatatcaatgttttcctgaatgcggttatatccattggtgcggaagtccgttatccgaatccgaaggatcgtcatacagttacaattaacggttgtggtattcgtacacacgaagtagacaatgactatatcagaaagatcagagcgtcctattatctgattggcgctcttctcggcaagtacagggaagccggtgtggcgctgcctggcggatgcaatatcggcagcagaccgatcgaccagcatcagaagggattcaaggccctgggtgcgaaggtatggattgacagaggcatgatctttacttctgctgatgagttaaatggcaagcatatttatcttgacgtggtcagtgtgggtgcaaccatcaatattatgctggcagcatccagagccaaaggcatgaccatcattgagaatgcagcgaaggaaccgcatgttgttgatgtggcgcagttcctgaatcagatgggggccaacatcaagggtgccggaacagatatgatcaagattatcggcgtagatcgtttcagagcagctgatcatgagattatcccggatcagatcgaagcgggtacatttatgtgtgcagctgttgcaacaaagggtgatgtgacgatcaagcatgttattccgaagcatctggaatctatctcagcgaagctgatcgagatgggggcagagattgaagaactggatgatgccgtacgtgttgtagcgaccaagagactcagcccgacaacggtgaagacaatgccttatccgggattcccgacagatatgcagtctcagattgcggtatgtctttctcttgctgacggcacaagccttgttacagagaagattttcgagaacagatttaagtatacagacgagctgaccaagatgggtgccaatatcaaggttgaaggcaatacagctttcattacaggtgttgataagtatacaggtgcagttgttgttgcaccggatcttcgggcaggtgcagcacttgttattgccggactggcagcagaaggctgtacatgtgttgagcaaatccagtatatccagagaggttatgagaacttcgaagagaagatccgaagcctgggcggtattattgaacgcgtggacgtagaagaccgtacagatcgtgaccgtatgatgcgcaagatgagtcttgcagcttattaattatcactgaatgagtgggaatctctcattgtcgtatggatgacaatgagggattttttctgtaggagagggatcgggctacaaatcgttggaattgtagtgctgcatcgcttgactttaaacttattttcatgtatgctatgtaagcaatcaacacattaaatagtcaactgattaattaaatagtagttttctcttattcagagcaatggagaccaaggatctgtgatattgcggcaacccccatgaggaaggtgccaacctgagcgagtaacatcgaacaataagaggatttgatcgtatcaagtccgctttgagcggatttttttttgccatggacagcagtgtttggtgccaagggcagaaccaatgacgattaaatagcaataagagaaatagtaactgtgaagagaatgcgcagttatgagagatactaattcgacaaggaggacataatggaaaagttattattcacatctgaatctgtaacagaaggccatccggataagatttgtgaccagatttccgatgcaattcttgatgcaatgttagaacaggatccaatgagccgtgtcgcatgtgagacatgtacaacaacaggtcttgttatggttatgggtgagatcaccagcaatgcgaaggtagatatccagaacattgtcagagacacagtcagagaaattggttatacaagaggtaaatacggctttgatgctgacacatgtgcagttatggtggcacttgacaaacagtctacagatattgccatgggtgttgataaggcccttgaagccaaagagcataccatgtctgaagaagaaatcgcagctatcggtgctggtgaccagggtatgatgtttggttttgcaaccaatgaaacagaagaatatatgccatatccgatcgcactggctcacaagctggcgcgtcagctgacaaaggttcgtaaagatggtacactgccttacctcagaccggacggcaagacacaggttacggttgaatatgatgagaaaggcaaggcggttcgtctggatgctgttgtcctttcaacacagcatgatcctgaagtaacacaggaacagattcatgaagatatcaagaagtatgtttttgatgtaattcttccagcagagatggtcgatgagcatacaaagttcttcatcaacccaacaggccgttttgttatcggcggacctcacggtgacagtggtctgacaggccgtaagattattgtagatacatacggtggttacgctcgccacggcggcggtgctttctccggtaaggactgcacaaaggttgaccgttctgctgcttacgctgcacgttatgttgccaagaacctggtagcagcaggtattgcagataagtgtgagattcagttatcttatgccatcggtgtagcgaatccgacatcgattatggttgatacgtttggcacaggcaagttatccaacagccgtattgttgagattatcagagacaactttgaccttcgtccggcaggcatcatccgtatgcttgatctgagaagaccaatttataaacagacagccgcttatggtcattttggccgcaacgatctggatctgccttgggagaaactggacaaggtagatacattaaaggcttatctttaggttacgcgaataatgaagcaggcccatgtatgggctgacgtatacaaacgcaggctattttcgatgatgaaaatagttctgcgtttatctttatctctttttcataaaaaattttattatcttttacaattccttttcacgattatgatataatgagcgttagagagcgggagcaagcaatgcttgttcatcgcgaacggcgaatggcgatcatgatagctgcgtatgcagcgtcaagcaccaaaggtgcgaatcatgatataataagttgaatgtttaaaatcggtggtgattttttgaaattattaacaagaataaagatatcttattttctggcttttatctgtccggttgtattgattctggcgaccgtagtcggtgtgatgaagatgggactgaactctatggagcagaagtatgatctggatcagtccagttacgaaatgatcctggatcccatgagcatgctggggcatatgacagcatccacggtggaggaattggaacaggtgacgaaggaggatccggataagctgttggatcaggtttatctgaagaaattgaatgagagactttccaatcattcttcttatctgctggtgaagaaggactggcagaatatttattcaggacttccaaaggaaggaaattataaggatgacctgaattattctccaaaggatggcaaggatgagagcctttatgttatggatgagcagccttatcatattcagcagacgaatttcacattttctgatggatcagtcggacaagtattaatatataccaatgtggcgcagattgtaccgcagatcaagaaactggtggcgcagattattataacgtcactgctgatcttatttgcaggaagttttattgccatgttctggctgtataagagtattgtgcatcctctgaacaaattgaagacggcggctgagaatatcaaggacggcaatctgaatttcagtgtggcggctgagacggacgatgagatcggtgaggtttgtgttgcttttgaggagatgcgtctgaagctgaagggtcagattgaacgcaatattcagtatgagaaggagagcaaggagcttatcagcaatatttcccatgacttgaagacaccgatgacggccatcaagggttacatagagggtatcatggatggtgttgcggataccgaagagaagaggaatcgttatatccgcacgatttataataaagtcaatgatatgaacagtctgattgaagaattgttcctttatgccaaactggacagcaattccgttacctattcctttgcaaaggtgaatgtggatgcttatttccaggattgtgtggaggaaataagcctcgatctggaatcccagggtgttgattttggctattttaactatgcggacagggataccgtgatcattgcggatccggaacagttaaagcgtgtagtgaacaacattatcggtaattctgtgaagtatgcatcgccggatcgtaaactgatgatcagcctgcgtattatggaagaagcagaatttgtcaagatagaaatcgaagacaacggcaagggcattgcgcgaaacgaagtgccgctgatatttgacagatgttatcgtacggatgcatccaggaactcttccaaaggcggaagcggtctggggctgtccatcgccaagaagattattgaggagcatggcggtaagatctgggcagtcagtacagagggtgtcgggacgacgatgtgttttgttttaagaaagtataaggagaataatgtatatgagtaagattttgattgtagaagatgaagtggcaattgcagagcttgagaaggattatctggagctcagcggttttgatgtggtgatgcagcataccggtgatgccggactcaaagcggctttgaatgaagattttaatctgatcattttggatctgatgcttccgaatgtggatggttttgaaatctgcaagaaggtccgtgagaagaagaatacgccgatcatcatggtatctgccaagaaggaagatatcgataagatccgtggtctgggtctgggggctgatgattatatgacaaagcctttcagtccgagtgagctggtagcccgtgtgaaagctcatctggcccgatatgaacgtctggtgggcagcggtgtgaaagccaatgagattattgagatccgcggtatcaagattgataaaacagcccgccgtgtttatgtcaatggtgaggagaaagcctttaccaccaaggaatttgaccttttgaccttcctggcggagaatccgaaccatgtattcaccaaggaggaattgtttaataagatctgggatatggaatctattggggatatcgcaacggtaacggtacatatcaagaaaatccgtgagaagattgagtttaatacatcgaagccgcagtatatcgagacgatttggggcgtgggataccgctttaaggtttaaaatggggatagagtgcggctctaaagggttatgataaaaggaatcgaaggggccattcgacacaggcacactcgcgttgcctaatgctggcagcagtacataagatgctaaaaaacagcatctaagtactggccgcattagaagcacctgtgttgaatggctcctttcgattccttttttggcaaatttttgagccgcacttttattgcagttgaagatggctgtaaagcgagtatccctttggataggaggaagaaggagttcggaaggtatcgaggaaatcccgttggtagtgtaaaatggttgcagaacaaaaagcgtgaaattgttttaacaaaagttagcaagaattctccttcctctacaggtgggagatgaattgcagaaaaaagaaaatagaacgcttgttaactggggaaaaatgaatcgcggggcacgcgaggatagcttgtagatacttggctcagtagagccattgagcaagaagcttccacttcaaaatctgtgatttaagtggtgggagcatgtcacacaattaatataaatagtgtaacgaatggtgttttagggacattaatagatgaaaataacagttaggaaaggaggcgggccgtgaaggttacggatgaggtttacagggagtattcccagatggtttataagtatctgttttcgttgaccggggatgcgcatgtggcggaggaagtgactcaggagactttttatcaggcggtccgctgtgccggtcgttttgacggaagctgccgtttctctacatggctttgtgctattgcgaagaatcaactgaacagttatagacgaaagcattttgtgccattcgatgatacagagaaaccggaggcgttggcgaaaacaggagcaggaaaaacggatgtgacgccggagaaaacagtgctttcagagtatggccgtgtcgaaattttaaggaaattgcatcagttagatgaagcggtcagagaagttatgtatcttagaatttttggtgatttatcttttgcacagattggagaaatcaccggacggacagaaaactgggcccgggtaacttactatcgcggtaaggaaaaactaagaaaggagctggatgggaatgagtgataaattgagatgtgaaattgtgcaggaccttttgccgagttatgtggatgggctgaccagcgatgaaacaaatgaagccatcaaagaccatctggcggactgtgtttcatgcagggatatgtatgagcgaatgaaagcggatgagacgtcagctgaggaaaattcagaggtgatggaaaaagaaaaaaaagaaattaattttctgaaaaaaattaaacagaagcatcggttgaatctgatgctggtggtagtgattctgacagttttttttgcagcggtttattatcatcagacttatcagaaggggaaagaaatgtcggcggatgaaatagattattctctgcagtggaacagcaatgacagtcagttgaatattctgggtaattttaagaatgctaatcgcggatatacaaggttgattggtgaagaggacgaggatggcattacccatttgaaaatttattcatcaccggtgggaagcaggcatccgaaccagtttgttgcaggctattccaaggtgaatgcagctgaccaggtatggcttggggatagaattatctgggatcagggagagaatatcagcaaaatgacatcggatttgtatcaggcgaaaacgccgtatgcaggagatgcagttgcagtcaaaacgttggcagatacagtcggtgtcggtaatcattttggcgcatatcacatttccttggagacatctgaagaaccgtatgattgtcagtttatcattcaatatccgatgaaaggggaaaagaaagagaaagctctggagcagatgaaaaaagatgcctgtgtaatgttggcactggtagacaaccttggttcagtttcatggggatacatgatgacagcggaggataataatggtgtggaaacattgcagatgacagcggaggaagcatctgcttatgtaggaaaaaatatcaaaacctgtggtgagtcaccaaaagccctgcaggaaatgctgacgcagctggattttatcacagatgatggattctatgttgtttcgggaactgaaagggatgaaaattataattttaaagttgtgatttatcattctcaacaggtagatatggatggactgaactgcggctttggctttgaatcccgtattggaaccgtttgcagttctgttatgtattgggagcaggaagaacatcctgaacagacagtcattacagtgagtccggaccggtttaacaggacgctgactgatgaagaagtttcaaaactgacactcagtgttgctgtaagggatacttccggagaatggcatgaggtgtgcgaggcattaccgcttcatgcgaagtacggggatttgctgaagtatactctggaagaaaatagtgaagatgggtacagtttgaaggagaattaataagcaaagccattgctttttattataccgaatggtatactggtgtcaggaggtaaaagcatggacaatcggatgaatattttgcagaaagcattgcagcttttctatgaaaaaggctatgatgccattggtgttcaggaaattgcagatgcggccggagtgacgaagccaacgctgtatcactattttggcagcaagtacggtttgcttgaggcagttgcccgggaggattatgtgcagttgagggacggcctggcagtacgggcagaatatgcaggagatttgccgatgaatctggagcgtctgacgaagttttatttggacttctgcagcagtcatgaggcttattacaagctgatgatggccatgatgtattctgcgaaagaatccgacacctacaaagtgatttatccgtgcatgcaggagattatcagaatgctgaccgacatgtttctgaaagccggagatattatcggcaatatgcgggggcgccaggaacagtacagtatcggttttttcggaatgctgaacaattatatgctctactggtttggcagagatgcagaaagcagaccggaattatcagaaggtcaggcacacgaattggttcatcaatttttatacgggatttacgtttaggagacagggaggtatacaatggctttagaacacagaatttcagaattggacacctatttatttgcaaaggggagacattatgagatttatgagaagatgggggcgcatctggctgaagaagacggcaaagcgggcacttatttctctgtatgggcaccgaatgcaagaagtgtcagcgtggtaggcgattttaacaactgggacagaacggcgcatccgatgcagccggttcagcagtccggaatatgggatatttttgttccgggtgtgaaggcaggagatttatataaatttgcggtggagaccagccagggctatacggttttgaaagcggatccttatggcaatcagtcacagcttcgtccggataatgcatctgttgttgcggatatacgatattttgactggacggatcaggcatggcggaaggcgcatcaggagaagaagacagaatcaccaatggcaatttatgaagtgcatccgggttcatggaagaaagatccttccatgccgggagaattttataattttaagaagttggcggtggagctggcggattatgttctggaaatgggttatacgcatgtggagctgatcggtctttctgagcatccttttgatggttcctggggctatcaggtatccggctattatgctccgacagccagatacggtacaccggcggatttcatgtattttgtgaattatatgcatgatcatggcattggcgttattctggactgggtaccggcacattttccgaaggatgagtttggactgggacgttttgacggtacagcactgtatgaacaccaggatccgagaaagggagagcatccggaatggggcacttattgttttaattacggcagaacagaggtttccaatttccttgtggccaatgcattattctggattgagaagttccatgtggatggtctgcgtgtggacgcagtggcttccatgttgtatcttgattttggtcgttcttccggcaactggattccgaatgaggatggcggcaatcagaactatgaggccattactttcctgaagcatctgaattctattgtggcacagagaaatccgggggctatgatgatcgcggaagaatctacagcctggccgaaggtaactggagatgtggatgacggcggtcttggctttacttataaatggaacatgggatggatgcacgatttccttgagtatatgaagtgcgatccgattttccgtaagtaccatcagaatcagatcacattcagctttatgtatgcttacagcgagaattatgtgctggtgctttcgcatgacgaagttgtgcatttgaagaaatctatgatttacaagatgccgggaacaatgccggagaagttcggcaatctcagagcagcctatggtctgatgatgatgcatccgggcaagaaactgctgtttatgggacaggattttgcccagacagcggaatggaatgaggctaagagcctggactggcatttgcttgagaaatatccggagcatcagcagctgaaccattactattgtgatttgctgcatttctatcagaatgagccggctttgtatgaactggatgattcaccggaaggttttgcatggattaacggttctgatgcggagcacaatatgctgacattctgccgtatgaccaaggataagaagaactgtttgttatgtcatttcaatttctcaccggtggcttatgagaattttcagtccggtgtactgtgtccgggaacctatacagaggtctttaacagcaatgctgcagaatacggcggtacaggtctggtgaatccggaaccgattgaagctgtgaaggaaagctgggatttcaaggactactctattaaatatcatctgggtgcttatggtgtatgtattttcaagtttgattatgtagaacctaagccggaagaaccacagaaaccggcaaagcgctatacaaaagaagatattcacaaattggccggtcattacaagaaagtaaaatagactgaactattgggcatgcctctgttcttaaaaaaaggacaggggcatatcttaaagaaaaacgggtgacgaaagatgcttcgttttctgatcagaggacttttggggtccttttttattactgttttttctttctttcttactgccgccgggattgttttgccggtaggcgtcaatgtgctgacttttttgagctgtgcaatactgggtgttcccggacttttgttggcctatgggcttagttttattcaaatctatgtctgaaaatgtcgaagctcatggataggactcgaaaaaagtcagattattccgatgaatattgataagaatcagataatatcgcatttacaaagcagatagggactgctataattcagatacaaaatccaattcatcaaaaattccccttttaaaacgataaaattgaataacagggtgtgagaccatgattttacagatgacgctgctgctatttatggcagcagctgccgtgaaagattaccgcagttattgggttccgaatgaactcatactggctggggctttaaacgggtatatcctgcgcttttgggcagatggttccggaggcgtgatcgatggtgcggcaggaatggtgttgattttcatcctttgtgcaggtttttttgtcttgtcaatgtttggtgccggagatttgaagcttatgatggcaatggctgtctatatggggcctgtaaagtctgtacggatactgattgtgtcactggtatttggtgcagttatttcactgttgaaaatgttgaaatatgacatttgcagagaacgtttcagatatttgctgcattatgcgcagcgcatacaaaggcatggagcagaaccttatatggatatgtcgcatctacagggaagagagtactttatcataccgtttgctgtgccgctttttttggcactggcagcagagattgttgtttggaatataggtagtttgtgaggtgaccgaatgcgttgaaaaatgtaacattgctgatattggaaaaacggaaaagttatggagaaaggcttgccgcgtttcttgggcgtcaggcatattcgccatttaatatccaattgtatctggaacatccgatatcggatgaaaagtggaaaaaggcagatctggtgttgataacttcatcactgatggcgctgtatggggaaaaagtcaaagaggggaatgtatgtatactggatgaaagtggacaaataatcggaatggaagggaggaatgtgtacaaataccaatcagcaggggtgatttatcaaagattattggaactttgtgaggaaaatggatggatgttgcagggggaaagaaatcatggaaaaaaggagtgtgtgtgtgcagggatatacaggcctgtgaataatgaaaaaagttttcttaaggtgcttgaaatgtgcagacagaaaggcaaaatggggaatttgctgtatttgaattttgaaacagtgacgatatttgagcagtatatggagggggaaagaaggcaggaaggattatcagagattatttattatgtgaaacaaagaagcagtaatttggggatgaaagttgaaagaatggctgtcaaaggaccggtggaatatattgccggggcggcgatgccgatggagatgtgggaattggaggaggaagactggcggttttgccttgagaggctttgtaaagacacaaagtacgatcagattttgctggatttcggtacggtgatgccgccgggaattgttatggacagttgtgatgaatggtatgtagcaggggagcatgcgccatggtcggaacaattgacggaacgttttttgaaggcagctgggaaggcagccggagagggcttttcagagaaggtaaaaagattgaatgttgaagaatagagggcggggatgaagatatggagcagtttcagaatttgaaacagcagctgcaggagacggtgcgtcagagaatggatatgagcagtgaattatcggatgcacagattggtgaaatcatagattcggtcattatggaaaaaagcagggaagtttatatgagtgcggttacgaagctgacactgcggcaggaattgttcaatgcgatccggagactggatcttttgcaggagctgattgatgacaaaacagtaacagaaattatggtgaatggggcggatgcgattttttatgaaagagatggccggatctacacctgggacaggcattttgaatcccgggaaaaattggaagacgtgatccagcagattgtttcacgctccaatcgacaggtcaatgaatcaattcctattgtggatgcaagattgaaagacggatccagagtgaacgttgtcctggatcctgtggcactcaacggaccgattctgacaatcagaaaatttcccgaggaagcaattacaatggaggacttgatccgctgggagtccatcagtcaggaggcggcagaatatttgaaagtgcttgtgaaagcagggtacaacatatttatcagcggggctaccagtacagggaaaacaacatttttgaatgttctggcggattacattcctaaaacagagcgggtgatcaccattgaggattctgcggaacttcagatccacggaatagagaacctggtgagaatggaagtgcgtcaggcagatggtgacggagtcagtaatgtgacactgagggacctgatccgtaccagtttgaggatgcggccggacagaattatcgttggtgaggtccgcggtgaggaggcattggatatgatccaaagtattatatgtactatataataattatatatataacgtatataaggatggaaaatatagattagagggagaggcataggaacgatatgaacattaagtataggttattgtgtaaaaggttaatagaggaaaggaagagagtaggagtcattcaatattataatgtactgttcataatggagttagtgtcagataaagacatatggtctttagaacagtgggtgaatggtataaataacatatatatgaaagatatacataattggtgtagaatacattttgttaaatatcacacggtatttgtttacaggaaagagtatccggtaaaagcaaatatttggaatgggtattcatatataaggtggcggatggagcggatgatgaatttgggataagataaaatagtgcttgcatgaaagggaaccttaaagtagggtattcttttgaaagtatggatagaacgaaggataaggctctgcgctaatcatttggcagagcctgagcattgtcctgatccgtagaaaataaatctaactgaccttctggagtggaactttgatcggattcatcttcagttgaggtttctctttttttgggtgttttatgagtgtataatttctcaaaaggaagtgaatacttggattttttattgtattctagtaaaagagcttctgcgaatcctaatgaaccggcacgacgttctctggcagtacgactgatttctctgacagagacacgccctactttttctttaaatgtgtcatctttcattgtttctccataagcattatccagacgggcaatagcattaagcatattggaactaaaggacataggcgcaccttcccatgtggcaacgcaaaggcgtaaaacacgatcaagagtgtgaaaaccatatttttcatagatattaattaaagtggatacagcacatatacctccggggcgagaggaagaagtaatagagagatcatatgattcaacaaggtcacgaataattagttctctatcattaccagcttcaatattagccatgaatatttcataaggtagtaacgatttgacatatttcatctgatttgcaaaaatatctgcttcttgggtgtaaacaagatcatcataaaccatacaccagacaggagtttctcttgatccagagatgagagcgacaatttctatagtgtgttgtccgttgaacacataatttatcccatcacgtctacttacttttacagggtttatctgataaaggtcaaaattagctgcagcacgctgaacgtgtttgatggaaagattacgttggtaatcttgatttgaacataaatttttaataggtatttgctcaaaatgcacttggggaacaaacttttgtaaatcttcggtatttccatccataattatatttcctccaatttttttaaaatattatttgtggttgatattaggcacataagctgatatttaagcttatattttgctgtatcagatgcaattttaaaatctgaaacttttaatactctttcgatagaactgttccatgatggaatcgtcaatgtaagacttgcaatttccgcatctggatcaaattgtggcaggttgcgtatagatggaatagaaacggaagattctttctttaatatcggcttggcgtaattattccacagtaattcccgtttcatatcatgataactgagatgttctatcttttcggcaagaaggtagttatttagacttaaaagctgctcttttgataatcctgaaagctcaataatattagcttgggaaatccagagctgaccagagcgaactcgtttgacaagatccggaactttttcatcaattatatctagtgcactactgtaagcagaatatttgtaaacggtagccgttgctacattacattcttcggatattttttttgctgcgatgcttgcaccggaaatatgagatttattcgtagatgaaagttgtcttgaaactaatattttctcagcatcatattttttcccaatcaggtattttttattgatattggttaaatcctctcgtttaagttggtcagtacatatccatgaaattacatcttctttactggaaaaatggagtctttttattcggaaaggaatactgtgtttacgaaataattcatatgcttctatgccattaatgacaataccattccaggtgcagatgggggtataataggaatgacataatatctgttgttcaagttgtttataatctttttcaccgagatattgatacaaattggtgaattctagtttggtttttaatgtatatatactataattgcgcatactcatctcccattatttctgatttgaattctgtttgtggcagttttgtgatgatgttatccatggaaaatagagctattttcttatttgggtaaatattgccttctaaacggaaaatgttaaatttctcccaagaaaggttaagctgggaaagtgaatatagtaattctcggctgtataactcataactgttaccattgatgacaaaataatccttaactttatgtgccaatttatcctccgcacaactagcctttatacctatcattttttgatcaggattaacaagaagttgaatatattctgggttaccaatttgacggagtgtattgcggtggattcgtatacgattctttttaaagtcaatacatattagtggatgggaagagtgtttgttgttcataggatttttcctcactttctgctgttgatggtttttttgctttttctgtggatttatcagttaccttcttcttttcttgtatgtcaaatactgcgtagccttcaaatatattaacttgcattgatttttgatgttcttccactggaataccgaactgattcttccattcttcaggataagaaggtgtcctagcagtggttacagttccattgtcttttagtgtacgaggaaatatttcaggtgaagttaaatcgaaaatgaacagtatttcattgccagaacgaattagtttgccgagaatcttgtaccgataattaggattccagtccatgagagatatcactttagcaaagaaaatccgacaagtgatttgttttggtgaacgttttttcccggaggaacaccaacgaaaagagtctttttcttcttctcgacagggacggacagccagttttttttcaatgggattgactaatatttgcacatattcgacatcgggtagttttttaatgcaggcggtatttacagataccttgtagttattaagcgtaaacgaaggttcgtaaatatgagcgaagaattcgccacgtacaacttgataaccgtcatagctgaaagaatcatcgtcagtgacttccatttgatttgaggggctggatgcgactgttattggcataggtgtgttgattttcatcatatcagaaggttctgtagtcatattccattgatttgtaggttgctcgctcattgggtgtctcctttaatttctgtaataatattctttatattttgtataatggtttctttgggagtggtttgtagctcaggttctttataaggtttactttctgaagcagtctgccagtttttgtccgctgtaaattctgttaattctggcgcttgagattgagtataataattattaccgaagctattcatccagtcggcaggataagctaacacactcttagaatcagatattgtatcaggcgtattgttattgggggaggatacgtcgttggtagttgtcggtattcgtatttctgtatcgtccatgttgaaaataaggacattttcattgtctttttggtgtgcaactcctaatattctatatttgcattttttgtcccatttaaatatctcgtataatgttggcaaaaatgcagcgccggaaattggttttggaataggttgaccatctttgagacgtgaccactgcactttattttttgtttccgaggaacatggtcggatagcaagtagttttgatcttgggtgtattagcatttcgacaaattttatgtttggaaatttccgtatagcgtctttgttaaaagagatctgtttatatgaaaaagaaacagaaatccgaccaaccgaggagaaaaattgtcctctggcaacttcatagtctcttaaatcgaaggaaccggctgaagcagtaattgtatcaggtgcattcatattttccggtttaaggacgctttgagatgcttcaaagtagtctctggctttaaatccagaccatcttggattaatgcttataaatccacttagagagccttcttgtattacatgtaattctggtaaaatctccttatttccatatttcgcatttgtaattaatttttgaacagctatgaaatcatctctggagataatagcttcgtgatgtccgacttttctgtattgattacggtcttgattgtttttccttgatttatggtcaagataattcggagtccatgtttttctcgccagaacatccccacaatggcgttcattttgaaggatttgtagtatggtactggatgaccagacatcattattcttttttgttttacaaccgagttctgtcaaagaatcagcaatttgttgagcactgcttccattcagatacatataaaaaataagctgcacaattttagcttcatgtggattgattataagatctccattttcgtcttggtcatatccgagcagaggaggtgtaaggaatattccccgacgaaaacgcatttcaatggaagaattcataatttcacttttggtatgactttcttcctgcgcaagtgttgacatgaatgacagaatcatttcgcttttgggatcaagagtatttaaatgctctgtttcaaaaaatacaccgacgggtggacggagtgaagaaagctctcgtacatatcgtatacagtcaacaacgtttcttgcaaatcgggatacactttttgttatgattaaatcaatttttccagcttcacaatctttaatcatttttttgaatgcatctctatgttgaagcgaggtgccggaaatgccttcgtcggcatatatttctacaagcatccaattcggatttttatttactacatcctgataatgatttttctgtaattcatatgaggatgtttggcgtggatcatccgtagatacccttgcatatacagctactcgtagttttttctctgttttaaaaatatcctctggtggaagtgccgggattacttccagttcttctggatcaatacctttgtatctttgccggattctggctttttgttcatcaatattactgcttcgttcttcactttctttcatcaatagcgacatcctttatagttgatataactatcatagaattttttgattgaaaaagacataaaccatcagttaagtgattaacggatggtttatgtagaaatagatatttgattgtcattgaatgatttaataatcattcgggttatcagcatcgtaattgtgtcttgaggatagatgccaatcattgattcgtaaaatgttttttattgctgaaagaacctcgaatatgtaacgtttttcagtgctggtacaatctgccattaataaatcaatgtcagtttgatattccgtaggattgtataacaagttcccatagagtaattcatcaatagtaatttcaagtgcgttgctaattttgattaaagattctaaactgggtttacgcttggcattttctatatagcttatataaacagtagaaagatcagcaatttcagccagctcctcggcagataatcctcgttgtttgcgggtttctcttatacgtttgcctataagtgcataatttatttccatgtcctcacctcctttccatcacaacttgacttttttgtgttgtagatagaaaaaatggtgagctatacaacagcaattggttgcataaagagaagtatatcatatgtatatagcaaaaagaagattgtcgattgatgcgagaaaaaggcgataagttgtaattgaacaacagcgaaaaaagggttatcatttatgtattaaaaattatgtctgggaggaaaatacatggcagataaagaggaaatcaaaacattggaggaattagaggaaaaaggaagaatactgcgggagtacaaagaaaaattccggcagatgtgccaagaaaataaaatgataaagggttcgacagtgctgaaactatatgataaaattgaagaggtacaaagagaatatgagcatttagataataagctgacattaatggaatacaactttatatagttctattttttttgttttaatactactgtttcccttagtaaatacttgtaagatacatctctaatatttttgcggatttctagttacaattaaggtaactactatcggaaagaggtgtatttacttgcgcacagaggattatattgcggacaatattatagctttatgtaaaaaacgtgatatgagcaaatatcggctgtcacagttgactggtatatctcaatcttcgattggaaaaattattgctaaagaaagtttaccaactatgcctactgtagaaaagatatgtgatgcactgggagtaacaatggcacaattctttgccggaatggatgttccagtaagcttatcagaatcacaacaagaggttctgaatatttggaataatcttgatgaaaaagaacagaatgtagtgatacaaatgctccggggacttcaaaaataaaggaaacagttgtaacgaaaatgttgactgtttctttttttatggagttgggagattatggtaattgaaaagaaatattatgatattgcacagcgtgaattggaagaaatgcaaagagaaattaatgcagaaaaagcgcaaatgtcagaagaagagatactagaggataaaaaatggcatgatgaacaattggaaacaattattaaaaaggcagaagctcatatgcgtcgttttaagaaagttccagatcctcaaaaagtagtgaaattcacttttttacaaaaagctgcattggaaattgcacgaaatatgcagatgaatataaaaactgagcgtaaagaagatgatttatgggggacgatagaaatgtcatttaataatatgtggtttttagattcggctcctagtgaatggaaagatatttggaataacttgatgaaagaagctcagagagtgtatatagaagcaaaagataacatgatcatgtatcaatattattatgatttggcggtagaagttccttgtgtgtagacaaaatacaaataatgatatatgaatgctgttctgtaataattttatgatatactgtggatatgatatgtaaaaatagtcggagaaagattagtgaatgcacgattatttaggaggaaaaaagcatgacagatgcagaacaaagagagtctgcccgtcaatttgtaaaccgatggatgggaaaaggaaaagaagatgaagatggacgttcttattggattgatttattgacgaatgttttgggaatggataatgtgacagaacgtttgaactttgaaaagaaagtcgtaattgatggaaatacaaaacgtattgatgtatatattcctgaaacacgagtaattattgaacagaagagtcttggaaaagcattggatcagaaaatcaggaattcaggagatgttgatcttactccatttgaacaggcggacagatataatgggaagctgacttttgatgaaagagctcggtggattgttacgtcaaattttgcggaaatttggatttatgatatgaaccagaaacagccagaaccgacaaagattgctttagatgaattacaaagcaaatatccattgttggacttcttggtgaaaaaagaagtaaagacaatatcgcatgaaatggaagtatcaataaaagcaggagatattgttgggcttatttatgatgcgtttttaaaacaatatcgtataccggatattaaagaaaaagatgaaacgtccgaacagaaagaaaaaagagagcataaattaaagagcctgaatgctttatgtgtacggattgtcttttgcttatatgctgaagatgctggaattttgggtaagagaaatatgtttcatgattatttggaaacatatgaagtaaaggattgtcgaagagcattaatagaattatttaaagtattagatacgccgatatcagatcgggacgagtatttggaggaagatcttgctcagttcccatatgtaaatggtgggttatttgctgatgaaactattgagataccaccttttacagaggaaattaaagaattacttcttacaaaagcgtcagaagattttgattggagtgatatttctccaactatatttggagccgtatttgaatctacattaaatcctgagaccagacgttctggaggaatgcattatacatctatcgaaaatattcataaagtcattgatccactttttttggaggatttacaggaagagtttaatgcaataaaacaaattcaggtaaagcggactaaagataaaaagctggatgaatttcagaataaattagcaacacttacattcctagatccggcatgtggttctggaaatttcctcacagaaacttatttatcacttcgacgtttggagaatgaagtgatacgtgaaagagttggaggacaaatgactttagtagaagctcataacccaattaaagtctcaatacagcaattttacggaatagaaattaatgattttgcagtaaccgttgcaaagacagcactatggattgcagaatctcagatgttagaagaaacaaaaagtattgtttatggatttaatgatgattttcttcctttgaagacatatgtaaatattacagaaggaaatgctttaagattggattggaatgaggtcattccagcaacaggtctatcttatattatgggaaatccaccttttgttggtgctaggtggatgaataaagaacagaaaaaggatatggaactggtatttcatggaataaaggattttggaaacttggattttgtaacagcttggtataaaaaggcaagtgattacattcagaacagagatatatttactgcatttgtttcaaccaatactattacacaaggtgaacagcctgcaatattttggaagccattatttgaaatggggatacatatcaattttgcttatagaacgttccgttgggatagtgaggcgaatttaaaagcacatgttcattgtgtaattgtaggatttagccatgctaaaagtaataaaagaaaagttatttatgatacgaatggggatatgaaaattgctgaaaatattaatgcgtacttaattgattcagacgatatttttgttggcagtagaaaacaccctatttgtagtgtaccggaaataggaattggaaataaaccaatagatgggggatactatttatttgataaagaagaaatggaggagtttataaagcaggagccgaaatctcaaaagtattttcacccatggtatggagcaagagaatttattaatcgtactccaagatattgtttatatttgggaaactgttcaccaaaagaactaagagaattgccagaatgtatgaaaagagtggaggctgttagagagtatcgacttcaaagcacaagtgcaggtactcgaaaaattgcagatacaccaacaaggtttcatgtatccaatttccctaaagggagctatatagtaataccacaggtatcttctgaacgaagaaggtatataccaatgggatacatggatgaaagtgtgctatgtagtgataaagtaagaataatgccaatgggaacattgtatcattttggtgtacttgaatctaatgtacatatggcatggatgagagctatatgtggaagattaaagagtgattatagttacacggtaaatcatgtgtataataatttcccttggccagaattacaggaaaaacaaaaagaaagaatagaacaatcggcacaaggaatattggatgcaagagcattatatccagatagcagtcttgcagatttgtatgatcctttaacgatgccagtggaattaagaaaagcacatattgcaaatgataaggcagttatggcagcttatggatttggcataaaaatgacagaagaagagtgtgttgcagaattgatgaagctatatcaaaaaatgcaaggataagtaagaggagtagcgaagaaagatggatgcacataaagcgttaattaccaatatttttaataattcgacattggtggaagtccctttttttcagagatcatatgtgtggaaagaagatctttgggggcgacttcttgaagatatggagtttgtagtaaagacaaaaaaaccacattttttaggctctattattttaaaagaaggtcgcaaacctaggcaaggagaaaattttgcagattgtagaactatagttgatggtcagcagagattaacaacttttttgatttttatgaaagtgctttgcttaaaattaggacagactgcactgtttgactgccaatttagaatcatgggtcaaatgattgcgcttaggcatggaaggaatgatatacaggcttttgaaaaagtaatgacattaagcaaagcggaaaaaatcgacaatccagagccggcgtccagaataattggagcatttaattattttgtggaacatattgacgaaagtaagctggacattatgacaatatttgtaaatacacaatttgttcgtattgatttggatgcggatgaagacgaacagcagatttttgatacaattaattctttgggcgtgaatcttactacatctgagttattaaaaaattattttttcaatcgagagactgttggcgaatatgaaagaaaatgggcagatgtatttgaaaaagatgatgagactaaagtatattgggatagggaaattgagacaggacgaataaagagagcaattattgacatattctttgattcctattttcaattatttattcaggataagcagtacaatatttctaatgaagacaaacttatgtattccagggtagacaggcttgctcagtcttatcagcatttcatcaataaatattgtggtggcaataaaaatgttgtgctagatcagatgaaagaatatgcggagtgtttcagaaataatttgaagccaaatcaatgtggaatgagtataccgaaggaagaaggtattgaacgtataaatgttgtgatttttggattaaagaatacgacgatgataccatatattttatatattgcaaaaaacgtgcaggacaaaaacgagctaaataaaatgtatggaattttggagagttatataatgagaagagttgtggtacatgcatctactaaaagttacaataatttattcacttcattgattttgaataaagtgctggattcgcagactttaactttacgtttaaaaggaattggtgatgcaactacatattgtccagatgataatgaaatgaaaattggctttgaaacatcaaaactggttaatctgcaatcgaaaggaattatttatttgttagaaagtaaaattcgttcagacaatagttctacagcattgcttggatttaacaattacagtttggaacatttaatgccaaagaaatggagaaataattggggagcttgcgcgacagaagatgatgcaaaaaagagggattctctattactgacattggggaatttggcgattattccgcaagctttaaatgcatctatacgtgatgctgcatggaatgtaaaaaaggcgggaaagggacaaaataaaccaggtttacttttgtgtgcgagcggactttatacattacatgacgtacttcaaaaaaatgattggaacgaacatgaaatagaaaatcgtgcagaatggctcttagctaatgcacagaatatttggaaaatatagaatattccaaatccatataagctgaatgaaagtaagcgtccaataagagggtgtatcgaaatttctggctgttgcatgtaaactattgattagagttttgggagttgactctaaaaactctaatctaatctaaggagcaggcttatggatctttcttctttgactccagacaaacaggtgaaacttcaatactggctggatgtaatacggcaatgcagggcctccggactgacaaatcagatctggtgtgaacaacacgatatctctttgaaaagttattattactggctttccaaaattcgaaagcttgccctggaagaactgccccgcaagaaaaacggcatccacatgtgtacagaccaacagtcaactgctttaacggaatccccggctgagtttgcggagctttcacttccggacagaaacatttcccgttccactcctgcagccatacttcatatcggatccataacagtggaactttatgaaggcacatctgcccagatgctggaaaacattttgaaagccgtgcagtcatgttaggagatctttcccatgtggagaaaatctatatccgatgcggctacaccgatatgaggaagcagctcaatggcttgctggatatcatccagtacaacttcaaactggatccttacagcaattccttattcctgttctgtggaaagagggctgaccggatcaaagcagtccattacgagggagacggtttctgccttttatacaaacggtacgaaaacggacgtctccaatggccgcggaccggcgaagaagcaaaacagatttctgatcagcagctgcgctggcttctggaaggtttgaacccggagcagccaaaggcggttcagaaatggctcccgcataagtctgaaaatactgaaaatccttagaaatgctgggaaatctgacgattctatggtataataatcctatcgaagcgaaagggttttcaggttatgtcagctacggaacaggagtataaaaatcatatcaaagaactggaacagcaggtccggctcctgaaagagcaggttgatttcctgacccgtaaactttatggaacaaaatccgagaagacatctactctcgaaatcgaggggcagatgtctctttttaatgaaatcgaaacctgtgcggatcctgatgcacacgaaccggagcttgttgagatagagaagcacctacgtaaaaggaagtacaccggtcagcgggaagaactggtaaaaaatctcccccacagcaaagtactccataccatagatgaaagggaacagatatgcgataactgcgggagtacgatggtgaaagtaggggaagaattcgtccgcacggaagtacagtttatccctgcaaaactcaaggtgattgaccattaccgggaaacgtatgaatgcaggtcgtgccggaaaaacggaactccttatatggagaaggctccggtgccatatcctcccgtcctgcattctctggcatctgcatctaccatcacctggctcatccaccagaagtttgaattaagcatcccgctgtacagacaggaaaaagaatgggaggctttgggattacgtttaagcagagcgactatgtcaaactggcttctggttgtctatcgggactggcttgtacacatcgtccaccgtctgaagctggaacttctgaaacagagataccttcatatcgatgaaacacatgtacaggtgctgaaagaaccgggacggaaaaatacgtccgattcctatatgtgggtttactgcagcatcagagatgctgtaaatcccatccgctacttcgagtaccagccgggacgaagcgggaaatatccggaagcgtttctgaggaaatatgaaggttatatccatacagacgcttactccggatacaatgcagtttcaggagtaaaaagatgtctttgctatacgcatctgcgccgagctttcgtggatgcgctcccaaaagacattcataattcggaagcatcaaaacctgcggaagcaatcctccgtctgaatcaactctttaacatagagtcagagttggaggcgctccctcctgatcagaagaaaaaagaacgtcttatccgcgagaaaccgcttctcgaggctttttggtcatgggcagaaaaaagtgccatcggagagctgccgaaatccaaactttcaaaagcttttcactacgccttaaataaccgtgaaggtttttggacttatctggaagacgggaattgttccatcagtaattcgcttgcggaaaactgtatccgtccctttgtgatcggcagaaagaactggctgttctccggcagtccgaaaggggcggaagccagtgcaggaatctatacactggtagagacagcgaaagcgaatgggcttgccccgatgaaatatataaaatatatcctgtccgacatgccggggagtgcttttcttgaacatcctgaatatctggatgattatctgccttggaatcctcttgtaaaagaattctgtcgataaccgttgaccttttaatataaaaggctgacggttatttttctatacactgttttatttgacgcttacgaatgaaaaccaatatgggaattttacaggtggtacaaaatttgtaaaattttcatattggttttttgtgatttgtaaaaaatcataaatttggataccgagtaaggttttggactttttgatttttattttttttcaattttggataaggctccgaaattggcaattttgcggaagtgtatccacacttcctgtccttgctgttttaataatcacatggtgatttcacagggatatagggctgtttagcctattttttctccctgtgctgtgaccgaagaaattcgaggaaccaattatatatttatgctgaatgtgaggaactggggagcacaatcctcagcaagaatcctacgtccggaaaatatcatattgctaaaatagcgatatggtattaccggggtggatcttgctctagtgtatactgagacctcggcataaatagaaaaatgggtttggggaatccccagcaagatgaaaacctgatgagagaatattgtgatgaaagacaatattgttaaacacaggtggatcttgctctggggtaagaaagaagtatctttatattatcaaaatgatatttggagtttatgttgttggaaagtcgtaagcaggaagataacttcaagttgttggtgcaaatataatgaatagaagtgtccagtacatttttggtgatgggtattttggtggaatccatttttatttatttttgaataataaaattttgaatctgtagccgattctgcctgccggacaatgtttttagatatctgtaaacgtcacggactggaacttgatgaagaaccatcggatgatggaagaaagtatttggaaacacgatagaagcaaacgctgtacttatcgtcttgtctggcagggaagattattaggcattaaccagagagatatcggcagagaaaacagaagtgatagacaatgatatttgttagatatgcttcttgtcgttggctgcatcatattaaaacgctttttacgttaaaaaagtgctgtgatcacaaggctttttgcaagcaaaaatgaaaaggctatatataggtagcctgtgaaactggaagtgcccattttgggcctgatttaaagaataatgttctgacagagaccaatggaatgactctctgctggggctccaaaagaaaggagaaatgattatggaaaaaatgatgaatacaaaaacagagggtaacacatttacaaagaaaatcgggcagacagtctatgttgtccgttatcatttcaatgaaaatgcaaaggaaacaatgcaggagaagattaaccggatgctggttacagaagcaagtcgacaggcagtgtattaaaattaggtggatgtaattgaagaaaaaatatgatatcatgtgagtaacaaatcggaattttgctttcgatgaccagaatgaaaatcgttaccgttgcgcctgttttcacaagcgttgcgtgacataaaaagaattctattttaagatcaaagtatcaaaaacaaaggaggttctttttatgttgaaggaattaaagaaaaacaaaatgagtgttgttgcaactggaattttatttggtgttatgggggtattaattattcctatgatagcagtaattgtaaaaatatcgaatgcattatcccaaaaacatcctaggatatacaagtatagtatgattgcttttatcggtatgttattggcaattagcctattttgcattgttattaaacatcagatgagttttcttgtaatagttgcttgtttagcaataacattatgcgacactattaaaaacagataataaatggagtacaactatggaaatatcagatttgattaaatcagccagaattgaaaagggcttaacccaacaacaactggctgatgttgtctttgttacacgacagacaatttcgaaatgggaattgggaaaaagtgttcctgaccaagcctctcttatattgctataccagtatttggacatcaaggataatgagaaaaaacagttatcaaagcttatttttaataagcaaaatattatattaattttgattgcaatcttattttctcctatggttattggagtacgttttatttgttgtaaaattgataagattgaaaatcgaaaaattaaagcggtaatcaaggttattggctttgttgtattctcatcgtatctagtatctttaaaagaaaatgtggcgtatttgttaattggtatattttctctggtgtatttgttatatcaattctatttgagtggattggaaactaaatgatttgtgtcagcaagtttaaggcaagcgataattcatgaaattccagtttgtagaattcaaaaatttaatatgaaatgtgagatagagcgtatggaaataatctatatgttctatttttttgccttttttgaaaaagtgattaaaaaactattgacattttgttactggtagaagcagatggttataaaaagcttttgataactatgagtgcaaaaacagatagctgcgaaaatttattatgagctaatagcaaaatttgatattttgtgatattgagggtatggggaatcgtaatctccattaagttcgtcagagaatcataatccagaaatgggattttgagttattctaggcgatacttgctttagaaaatgatttgccataatgagttagaacatgggaggaggaagcgttaaaaaaagagagagccataagcaactctctctgtgataaaatcaaaaagttatagtatcagtgattcggtaagattacaaaaatccttaacaggaatattttctttaagtggtaaagctgtctctaaaaaggtttcgtctgcaaatctttcgagttcagaatcaaaatgtattattgaagcatttgtatttaattggtatggtggaattgtaacaaaataatcataatcttcgtaagaaggagtggcgcaagaaactttgatttttccgcccaatttcaattttgcaaattctccataaatggcagttaaggctttttccctttcttcatcagaagtaattctatctacatatctaatataccaataatctatatttccctcttttaattcaattaaataatcgtatgatctgggcgttccagattttattgtccattcaactttatgcagacttgtcatcatggaaagtccacgcattaaggtagaaaaaaacttttcatgcacctgaacagtagagagatccagagaaaatccattgtctgcaattatcttttttcgttcccgtattttcttagaagaatatcccgttgcatcatataattcttggataagttctggatcatcaatggcttttgcaattttatcaatagtgcttttatatggtcttccagatcgggcaccgttgagcattcgtgaaatggttgcattatttaagcctgtttgttcagataattctttttgtgtttttttctgtaaaatgatttgaagtatattgatgaatctttcctgatcgtaaacgctgttaggatttattagtgtgcctgaatttgatataaattcgttcatttaaatctcctcttgacttctttgactttgtataaattgacttcttttattttatcttatcaattatatccctaaaaatcaatttaaaacataaagaaatcaaaaaatgctttattgatattgcttcaaaagtcaaagaagtcaaaaacgtaattgacattttgacatctttgtgtataatgtaaatcaagaagtcaaagaagtcaaacgaatcaaaaagaaagaaaggagggctgtggattgaaatatagggttgtttcgattttgaaagataatagaccacgttttttgattatttctgatattgaagaaattgaaatccttccatcaaagtatttgaagcatctggatcagattaatgcttctccgaatactgtaaaatccgcagctttcgcactttcatattattacaattttctgcaggagcaaacgataggattggatgagattacattgctatcctattcagagcagaataaacattttattgatttcttgtattgggttaagagtggaaaacatactgagcataatacacagacgagcaataagacctgcaatatgtatcttggtgcagtcttcagatactaccagtttttggcattagaagatgttttgccaatgcttaaagtcttacgagtaaaaaaagtatcgtattttgacagtatgggagtaaatcatcaaaatgcagtgaattcgtttaaaggtttcttcaaagaagaagaacctaatctggaagaaataacatccgaagaaatacaggaactgctaaatgcctgtacgaatgatagagatcgattgctgatagcaatgatggcagaaaccggtcttagattaggggaaatcctgggaatccattataccgaagatattgattttgaaagaaggacggttcgggtaaggtatcgtgaatccaataccaacttggcaagagcaaaaaatgcagaatatagaatggctttgttaagtaatacaacttttgagttcttggttaagtacatttctgataaccgaaaaagtctgattaactcggagtatctatttacaaaattgactggaaaaaacaaaggagagccattagatgcggattctgtgtatagcatgttgaaaaggctatccaaaaaaacggatatcaattcccatccgcatcagctccgacactattttgcggaggaaagaagaaaagaaggatgggatttgaatgacattcgttttgccctggggcataagaaagttgaaactaccattaaatacttgggtgaaaataatgaacgattaatagaagcgacagatcaatactactcaaataatgaagatttataccaaattgcagattttctgtaaaaggaaggagggattaccttggcagtattaaaaattgttccgaagttatatcaggaaaaaatatctgagaaattaaaggaagaaatatctttaattacgaatggagaagcaaaatactataaccggttatacaaattttttcagtatacagatatacagtgtactgcagatattaactataaaacgagaaaaatgtatatggattctcttgaaaaagaggatatttcagaaaaatataaagcggaattactgagcttatttgatcgtttaaaaatcgaaaacatgccggatgtctattcacaaggaaatcccttctctgtagaacaggagtttttcaagcaagacaaattgtttttactgtatgtccccaataagaagaaagcacaatctttccgtcaggtggtcgataagaatgatttgttatgggacttaacgaggatacattcatcacagttggtgcgacagacaaaaatattgctgtgtgaaattctgaatatggataaggtacaaagacatcgaagatattttttagaaccattaaaagcacttatacggttttgcgataagtatggaatagatgatattgaagaaatggaacaggcagacgaaaacagattttatctgtatttaaacaaggagtcggaaattataaaaaaacaggcttctaagattgttgagtttgcgagaagaacgttatttctaacagattcagagacaaattggcgagcgtgtatctggtatatggataggtttcagtttgataaatcgagaatcaatgccagttcacctgttaaaagtctttcatttattaatatttacgagaaagaaaatcgttggtatttacaattatacgcaaaatatttggtcgggatatctgatctgtctttatcaaatatccgaaatacaataagttttatttcacaatttttaaaatatctggatggacagagtaagaaagtaactgaactggagatacaagatatagcggattatgtgtctgttttggatgagtccgatattaagtattccacttttaaccgatatatcacacatatgcatacatttctacagtttttgaaaatgaaaaatattgaagtgttgaagttttatccggaacgatttttaaaaaaaggtttttcagaacacaatgaaagaagtgttccagaaaaaacaattgctcatctgattaaggagctgccggcattcccagagcatttacagttgatgtatttgattttgttttgcacaggaattaggaaaagcgaggtttgtacaataaaatcgggagccttttattcacaaggcaatgagaattggatgcgcatatatcaaagcaaaatgcggagggaaaaagtcattcctgttcccagtttattggttggactggtgaacgattatgaaaaaaagtacggaataaaaaatggggagtatttattcaaaaataaaaagggtggtgcatttaatggacagacattttcaaatcagatgattcgggagtgtaaggctcgtgggattgcctgcggagattatatctttagagcacacgattacagacataaccttgcaacttcaatgtacggaaatggggtttctatacaaggggtacgagattatctgggacattcaagtgagaatatgacaaaacagtacattgatttcatgccggaacgtattgtatcggctgaagataaatatttctctaaaaatcagtcatttaaattgaaaggagcagaagatgatgaaaggtaatattaatttgatttcgtatgactgttatcaacaagctacagaaaaacagttggcagggctaaaatggaaggaaaacagggtgtactacatatcagagattcataatgaaaagatacaggatgagatttatgggtatatcgatgatagatgtagacgtttgtcattatcaacagtagtaaatgatatttacagatttgatctgttgaaagattttctgaatgagaagtgtacaagttgtagcagcatcactgataaaaaatgggaagaactggagagaagttataaagcatttttatataaaaaaggattggcgctgtacgttagaagaaatagaccggataggcggaatgttgagcaacaaagtagcgctcaggtttcttttctgaaaatgtattatgagtatgttgtgaagtgtaaaacagcagatattccagaaaatgaaaaagatgtatgggatatgagaaagttggatattgtgccaaggagtaatccgattcgtggaagatatagattagattttcgtgagatcaggcagaaagaatttaaagagataataaagaaaatattgtatagtcactgccagacaaaagcaatgggtagtataaaaggtgaattgcgtggattccgtcggtttgctagtttcatgtatgatcgattcccagaagtaaagcactttacagaaattagcagggatatgatagaagattatctggtttatataaaaacggataccggtcttacatcagtcagttacacgacagagctgtcggttttggataatctgttggatgaaatagggcgtgaactggaaatagaaaatatatgcaacctatttctgtccagtgattgcagagcatatgataacgctttaccagaagcgtattcagatgcagaaatcaagagatttaattgtgcattaacaaaattaaagccccagttaggcagatgtttaataatacatcagatgctcggtacaagaatagaggatacgttgactttgcgaagggattgcttatctgagaaatctggacattattttataactattatccagcagaaaacaaggaaatacaaaagaccagttagcgatcagctggcagaattgattagaaaagcaatagaagtttcagaaaaggagcatccagattcagaatatatttttctgcaagataatggaaaattgtatacagattcaatgctgaaatatcatgtaaatatcatgatttatgaaaatgatatcagggatgataatggaaattattttgagtttcgtacacatcgttttagacatacttttggagtaaaacttacagaaatgaaattagatgatgatagcattgcaaggttgttggggcataaggatacacgaaccataccacattatcggcggttaagaaacgaagcattagcggaggatacaaaggctgtacgagatgaaatgaatgaattattagcacaatacaggagggaaaaggaaaatgcagaaacacgataaaatggtagcactggcaaaagaaaaaagtgcggaaatgacggaaacagcaataacagctattgaaacaatgtatagaaaaaatataaaaatttcagttgctgaacttacaaaactaacagggctttccagaggttttttctataataatccgaatgtgaaacaggtcatgatggaattgaaggaaaaacaacagggaatgatattgcgaaatcctaaaagtgatgctattgcaaaagcacaggaagcacggattaagagtttagaacagaaattatccgatagtgttccgaaaaacgaatatgaaagtcttcagaaaaaatatgaagaattacaggtgaaatatagtcaaatgaaaaagggaacactgttgaagatgtacgaccaattataggaagaaaaggagaatattttatgcagaacgaaatttatgatgagaaaaatggacttacttatatgttatgtggtgattattatttgccagaattgacacttacagatatcgaaccaacttatgggaaatatgggatgcttcgtaaaagctatttacaggaacacagaaaggcaaaatatcaaatattgttgttacaaggaaaacttgtcgcgcatttgaatcagattgatgcagaagcaagggataggaaagaacaattagtaaaacagatgatggagaaacaaggaattacagagaaattaaaaaggcaggacaacatggaatggacaaggaggatgaataccatttgtcatgatgcagaagagatgattttgacggaaatgatatacacgaaaggataatgaactgcattggatagcaagaattttgcagaccggatagcaaaaaagtggaagtccggatagcaaaaaaatggaagtccggatggcaaaaaaatggaagtccggatggcaagattcttgctatccggaaagataaaaaagtgagggattaaaaatgttggttaagtacataataaaagtgtttttatgtttaattcttgcagtaatgacattgattcgctggctattaaaaattccgataatgttgggaaatattttgctttactttttatcaattatatttattctgacaggtgttttgagttatggatttgcattggaatctgcaagagaatgtggtcgaatgataataattgggatggcatttggtgcaataccagactttgtcccatttttgggaaaaagtttagagacattggttgccaaactgttgagtatgacaaatgaatgagaaagtcgatatgaaagagggctgtgaaaggctctcttttctttttacaactgtggaatggcaagataataacgttatatacagtgtatattaagtacagatattgtatttctgcatgatgggaacatagggagtccatataaaggctctgaataccggtcatgatggctctttgagtaccggtcatgccaattctccgcaggatatgctgtcaagactggagacaatggctttatttgcctcggatataccgattcaggcaatccgcaagcagattgcttcttctattgacattatcgtgcagctggaaagattaagagacaggtcaagaagagtgacggcgatagcagaagtattggactgtacagaggatgcctacattttgaatccgatatttgagtttcatgagcaggataatcttgtgatggagagcagttcttacggtgatattccggaaagggttgtcggtcaactggagcgaacaggctatcatttgatgcacaggcgtaaattgcatgcagcggcccttgagtcagcggagatttagagatgaatgaaaaacaaaaattgttgatttctgacagtttacagggcgttcttttgggatgtctgatcggatggctctgttacagaagcgttattaccagtcttttggggatcatgatcgttccgctttacataaagtataaaaggcgaatgagggagaaaagcaggaagcagatgttatggcatgagtttaaagatgcggcggccatgctgtacagcagtacggctgcaggtggcaccctggaaaaggcgctgagagatacttgctgtgatatgaagacttcagacagcagttatcaggtgctacttccggaatttgaaagaatctgcatgcatcttgatcagaaccgatcattggaaagtgttctggaagattttgcagtgagaagtgaggatgaggatattgcgtactttgtgcgtgttttgacggtagcaagaaaaagcggcggttcactgtcatctatcatccgtcatactgcggatacaatgaatttgcgaatggaaattaacagtgagatagagacaattctggcaggaaaaaggggagaatggcggattatgctgatcgtgccaccggggattttatgctatatgaatatgtgctcgtcggaatatatgaatattctctacactgggttgacgggaaggctggtgatgacagcagcactgatggtctatgcggcagccctttggacaggtcataagattttggatattcatgtgtaggaggtggaaaaatgcagtttttctggtttggtgcaatattactttgtgcggcattattgcctgtttttttggcagaaaactggtgccgtcggcataaagtaaagaaaatttttcctgtgccaagaggtatgggatggctgcagagaacggctgtctggttgttgtgtcacctgccggatacaatcagctgttcaagatggctgacagggtgttcggaggacatcgtcggaaaactttatccggggatgaaaaaggagaagtttatcaggcagcatgtgattcgaaagatgatggttgggtatggcggcatgctggcaatcctggcatttatgatgatctatggtcttttgaatcagacgccggaattaagcggtaataatcttcaaagggatgatgccggaggcaagagtcgggacgttcaggtatctgcagagatagagggtgtgacagaagaaaagtcgctgacaattaccgttgaaccgagaaaatacagtcggtctgagcgggaagcattgatgcgggatgtgaaagcttatattgatgcatgtcttcagggggataactccgatctgcagcatgtgaatcggccgttgttttttccatctgattttccgggggagaatgtgacgattgaatggcagccggaagattataatctgatccgacaggatggctccttgggtgaattgtcagcgtatcagctgccgataaagacaaaggtaactgcggtgatcatctatgatcaggaaaaggaattttacagtaaagaaatctgcctgactgcaccggagaaatcagatgaagaagtgttggatgaacagattcgggaggccgttcaggcagcagatcagggatcgtcagagaaacttacgctgcatctgccggattctgtgggcggacgggttgttgagtggaagtatcagaaacagtcacaggcgggaactatactttttatagcctttttgtttttggcaggctgcatatggtatcaggataataacctgaaaaaaagacttgaggagagaaatgaacagcttttgtatgcgtatcccggttttgttcacagaatgatcctgatgttgggagccggcatgacggtaaggagaagttggaatcggttattggatgataatgatcgattggacagcggtcatttaaaagaagattggttgtacagagagatgaaatatacaagaattcagatggagtcaggcgtgcctgaaatacaggcctatctggaatttggacagaggatggaactgcagcagtataagaagttttctcagctgctgatccaatatattaaacgtggcagtaaaggcatgcaggcgttaatgcagcaggaagcggctgaggctgaaaagcagaggcgagatctggccaaacagttgggagaaacagcaggaacgaagctattgatgccgatgatgttattgttgatcattgtgttgttgattgttatggtgccggcatttttgtcgatgtaaagcggggagtgtgtggaatgaaagatttatgcagaagattcttttatgaagaaacagcagttggtgttgttgagatgatattgattctggtggtactgatcggactggtcattatatttaaacagcagctgacatctattgtaaattctatttttaagaaaataaccagtcaaagtaattctatatgatgaagaaaggcgttatgacggtttattttagcattgtctttatgctggtgatgtcgtttcttctagtgcttctggaatcagacaggctatatattttgaggacggaaggagaacgatatgctgatatggctgcggagatggtatttgcagggtatatacagcctttggcggattattacagtcttttcggtgtgaaccatggagaaaagaacagtcagcttgaaaaatttgatgattatctcaagttaaatataacaggagagggaaagacaaaaaggctgtttcagatggctggtgcgattgacgaagttgaggttgatgaatggaccggttttaaggataatgattggaaagcactgacggagcaggtggaattatacgaagaggcgaggacaattcagagaggcagtgaggaagtgagtcgtttcttttcggatttgtcagggatggatacagacgaacccgttggtgattattgcaggcagttagagtcaaagggagaaagaatggaggcggaagaacaggaagcgaacaagaaagatggcgggaatacgccaaaggacacagagattcagatggaggatccgagaggcggaattacaagatggcttaaaggcggtcttctggaacttgttatgggggatcaggtggtttcaaagcaaaaaataagcacagcaagatgctcatggcagacctcggaggagaaaaaaagcaatgtcattgttcgatttgatcggtataaagaagtagcggaagcggtaaaaggtcagaatcttttgtcacagatacagtcgggagtaaaaaatcagagtgatcagatgattctgaacatgtatatatatgatcagtttaaaacattgcgaaacagccggccttccggaagatcaaaagataccgctttgaattatgagatagagtatattgcctttggtcatgcttcagacagagaaaatctggaaagtgccgtgacagcatgttttacacttcggacgattttgaatctggcttatctgtatttaagcccggataaagatgcagatcttcagcgggttgtgcaggggctgtctgcagcaggaatgattcctgtagcgggagaggtgctgaaattattattaatgatctgctgggcttcggcagaggcggccgtggattgtgcagggctggcagagggcggcaaagtccctttaatgaaggacagaaatacatggaatatgtccgttgaacagctgctgcatgctgccgcaggcggcggaaaagcctctgaatatttcaaatcaggtacaaaaggatgggattatcatcaatatctgatgttgtttttaatgctgacaccgacagagaaaaaaatcatcagaatgacacagctgatagagaacaatgtgtggctgatgaaaggttatgaaaactttcaattgaaaaattgtgccgtaaaggccagcttttcgggaaaaattgatgtgacgccatttttttggaaatatccgcagaagatacagtatcgttttcatacagaatatgcttattgattttacggaaaggaggcgaagaagaatgctctttttttacaagtcacacatacctattttctcatacacgggacactttaaaaaaatatataatgcagtcaaatgcgcgatcccaaccccaattttaaaaaaaggtgttcagtggaagaaatatttaaaaaataaaaaggcaatcggagaaacagataacagtaaaaaaagagcagtctccttcgcctcctttgcgggcagtctgactgtggaggcggcgctggtcctgccgatatttctaagtgccatgcttttattatcaggtttgtttcatgcgatgtctgtctgcagtcaggtgaatcattatttatgtatgacaggaagaaaaatagctgcgtacagtcgatctgaaaaaggtgtggatcagggaaccttatatcagctgttttattcggaaataggcgggagcggtatagacagcgatgatatagcaggcggatatgcaggccttattccgagggcagaatcgtctgaacaagggcgtctgataaagctgtccatccgctttggtataagaatgcccggatatttgctgctgtcacgaacaatttggactgtggaaaccgtttatatacggccgtggacagggaaatctgcggaaatgtacagcggtgcaggtgaatatggacaatcaggacaggtttatgtggctgaaaatggttctgtttatcatagagatttatcatgtacgtatcttgctttgtccattcatgcctgttcgatgtcatcggttcagcatttaagaaatcaatacggagcgcgttatgtgcaatgtgagagatgcggacatgtaagtgataaaaaccagacagtttttattaccgatatgggaaccgcctggcatacggatcgccattgcagcgggttgaaacgaacaatggatggcatgagccagaaggaggcagagcaaagcggacttcggccatgttcacgatgtggagcgagtggaggtggagatgcttagtgcgtgcatgatattgctgctatatccattgatagcggatataagaaaaagcagattttatataggaccggtgcttatttgcactttgatactgatgggaattggtattgtaaggggaaaaataatacttttttcagttttaacaggatggattcccggaatgatgatggttatgatgagtcgatggacaaatggaaaaatcggagaaggggacggtattgttgtcgcagcaatggggatgctgatcggctggtatgagatattgcttctgttttctcaggcgtgttttctaagcgccggttatggactctggttgatggttgtaagaaaaagcggaaaaaacagagctttcccgttcattccttttttgtttatggctgtactgtttttttcgtttttcgggcaatgaaaggaaggtccttatgaggaaggttgaggggagtatgacagttgaggcatcattgcttatgccgatggtgatttttattcttgcaggtctatgctatagctttttctttatgcatgattatattgtaatgcaaaatgaggggtatcggcggacagaggcagaattatggcatcgtgagacagaggaagatatgccggtgtttatgatgtcggttttgctggatggatccggaaagagcatattgcagcaggcggcggactgggtgaatcatcagtcccgtgcgcatttggttcttcagggagaattgaagatccctgtacccggcatacaaagctggacaggaggtgtgctgaagaccagacaggaagcggatgcgataagggtagattatacaagagacagggtgttggcggcattaaaaagagaacagtaaaatgagaaggtgagtgcatggaaatagcttatagcggtgatgcttttcatacatatatggtgatcagcagtgaggaatggggggaaaacgaagatgaagaaaagatgatgagtaatcagagtgcacaagtgcttcttccctttcaggtacagagattgaatgatagaaaaaattactgctacgatatcagcggacggatggaatttcgaagctatattgaaagaaagcaggctgatcggtcaatgattaaaagtgttatccgttttatagctgggttggatcaggccgttgaggaatatcttctgatgccggacggcttattattgcagccggaatgcatgtatcttgaaatgccggaagagaatctgagagcggcctatattccgggaagaaaagaagatttttcgaaacagttaaaagaattgacagcatggctgttggaaaatacatatcatgaggacagagaaggtgttttactggcttacgaattatataaaagcgttcaacaggagaactttttgccgggacggcttaaggaacttctgagagaagaaaagagggaaaatgtccaaggagaattggatatggaaaccaataaaacctttgttgaagaagcaagtgataaggggcagcagagagaagaagtcgatgctgacagtaaagaaccggcaagcaagaagcttatacaggggaagaaagcaatagcatggaaaattctgtcgggtattgtggttggcgcagccgttgtgtcttatatttgtggctggacggggaaactgttgcagacggccggaatgacagtatccgcagagtgggtgacggcagtttttatactcggggcaggaatcagtgtattataccgtctattgagtaggcgaacaggtccgaaagaagtgaacgtggagaaaagagatccggatcatcatgacttgtttgagggcggtggtgtgtatgcttttacggatgaaacgggagatgatatttggaatacagatgagaataaaacaatgctgttatcgcgttcggaaaatcagataagactgcttagccttgataaaaagactgcgccggatttagtgttggacagattcccctgtatggttggcagtctgcaggcggaagatgtatatgtgattcctgtcagaggaataagcaggaagcatgcaaggattgaaaaaacagagaaaggcatttatttaatggatctgaattcgacaaatggaacacgaatcaatggagaagaactgaagaaaaatgagaaaagaaggttgatggctgaagatattattgaatttgcaggtgttcgctatatgttttgctgattgaggcgaagactgaaaggcagagggggattatcatgagaaaaagacatttattaaaaaaagcaggaacatcgttgatcgcagcagcgttgatgctgtcttgtacagcatctgcatatgctcaggaaaaagaatcaggggcagcagaagatgcactggaagcatcagacgttattgatattacgaaaaaagggtctattgctatttataaatatgatatgacatcagcagaagcggcgggggtatatacggaaggcagtcatcaggcaaccggtgaggcggatccggcactacaggagataatgtcaccgtatgcagttgagggggtggaattttcatatttgcgatgcggggatatagagacgtatagttataatggaggagccgctgtgaaactggtctatgagataccggaagaactgcgtcgtatactgggtttaaaagaggcagatgctgtttctatgtcggatgaaaaggtttcttcgcaatgtctgcatacaggcgtatggcattatacgagtcagcaattgaatgatgcattaaaaaatggacttgaaaatgagaatattaaaacgaagagtgcacttgaaaattatttaagcacatctgagaagtcagagaaaatgaccttaacagaccagtttggatacacctatgcggataaactgcagacgggattgtatttgatcgcggaaacaaaagtgcctgaacaggtgacggcaacctgtaatccttggctggtatcattgccatttaccaatgaaggcggtgattggaatgatgaaaaaggcggagaaaaatggctttatgatgcggtatgctatccgaaaaatcagacaggcaatcctacattggataagctggttagacaaagccctgactgcggtggggacggtggttatgattcaacagaaaccgtatcagaaggggatgttctggattatctgcttgtgtcaaaaataccacatatcacaagtcaggcaacatggctgaaaatgtatacatttaaagatacattgtcaaagggacttacctacaataaggatgtcaaaatagctttatacagccatgaggaagatgcgataaacaacaaaacagaaaaggcagaggcaatttggacaactaatgaatttacgcagagtgcattgaaagatgaaaaaagcggacagacggtgctgactatttctatgacggataaaggcctggagaagatgaatcattcggaacagggcttttctgattattatatggtggtctattatacagcaaaagtcaattctgacaatacaactgtactgggagatgatggaaatgagaatgatgctgtactgacctggaagcgtacgtccgagaaatactttaatacattggaagatcgatgtgtggtttatgcctttggtttaaatttaaataagactttctcagatggcaaaggaaatgcggcaaaggcggcttttacactttttaataaggacaatcaggtctatgttgtggctgaagaagctgcgggcggcacatattatgtgacaggcaaaacaaacaagaaggagcaggcaacgattttcagacctgcagaatccggaaaactgctgatcaatggcattgaaggtgataactatcaattgacggagtgttcaactgataacggttacagtattcttaaagaaggcattatgatcacaatcaatagtacaacagagaccattattccgtcagtggccgggacaacaggtcttgaggctgcgacggatgcagggcaggcgatcaataaaaactataacggcggaattgtggatgcagagggtgtcaatgtttctgaaagcaaaggtgttcagcggctggaaaatgccaatggtcggacgattggcaaaacagatatgtatgagggggataagatcagtgcatcagcctctgtagatggtattgattcagcaatgagtgatgcagatggatccgttaatgcacgtgtgaatctgaacatcctgaacagtaaaacgtttttattgccgcagacaggcggtacaggtttatatgcggcaaccattatcggggcaattgcaatcggattgggatttgtactgacaagaaagaagagacagcaggcttagagatgcgttatgggacgaaagaacagaaaacgatttgaatgggtaccgtatttgtgtattgcggcaggtctattatgtatgctttatccttattgcagtgaatatatttttcagaatagaacagcttctgttatttcgacctatgagcgtacctcaatggcgttggaagaaagccaacatcaggagatgcttgagcaggcacagcgctataatgagtatttggccggcagccaggaaaaattgacagatccgtttcagacgaaaaagggtgaggccaatgatctgatgtatgatcaattactgagtacaggcggctcggatgtgatggcttatatcgaaattccaaaaatcaatgttgtattgccgatataccatggaacgtcatcacaggtcttgagtaaaggggtaggacatctggaaggcacgtcgcttccggtaggcggtcaagacacgcatacagttttaaccgggcatacagggcttgatcaggccaggctgctcagtgatttaaatgaaattgaagagggggatgtattctgcatttatgtgctgggaacgtgtttaaaatatcaggtgtttgatgttgaaacggtccttccggatgatacagatggtctgcaaatcataaaaggtgaggatagagcaacgttggtaacgtgtacaccatatggaattaatacgcatagacttctggtacatgggaggagaatggaagaaggttttgcagatgttgaggctccgagtgagaagatcgaacacagcagagattcacaatggcagaaacgatatcaatacgcagttttgataggaggtcttttgattataggtattattctgcttttttcacaggatattttaaaaattgcaggcatttgtctgatgatatcaggaacatttctatttatatcacctgaacttatgcagaccgctcagaaagtgaagatgcagattgtgattcagacctatgaaaaatcagaagaaacgcagaaacaacatcaggaggaaagtgcgctgtatcaaaaaatggttacttacaatcagacaatttatcgtgagcagcagaaaggactcgacaatttaggcgaggatggggcaatggagaactttaaaaatgaaatgatcggggttctcgagatacctgctttgaatcaggattttccgatttatgcgggtgcaacatcagagcatatgtcggagggcgtggccgtgatgaaagatacatcgcttccagttggcggagaggatacaaattgtgtgattgccggacacagaggatataacagaagtaagacattttttaaggatatagaatgcctatctgcgggtaatcggatatatattaaaaattcatgggaagaattagtctatgaagtggagaaaatcgatattgtaacgccaaatgatgtagatgcagtaaaaattcggcccggaaaggatatggtgacattgttgacctgtcatccgtatggttcgaatggaaaatatagatatctagtttattgcagcagagttaaggacgcagggaaggatgaccgtaagaaggaagtatcttatgcttataaagatcatattgttgcttcggatggacagatttattcgttatcatcaaaagatattcagaaagaaaaatattttagatggttatgtgcaattattttgtttttgataatggcagccatgaaaataaaagatatgtggaggaaaaggaggcagacatagattgcgaagaaagaaaagaacaggaatattgacttttttggtttttctcatttttgttttttccatggttgtttgggcgtcagatggaatcgaaggagaacggatggatacagaagatacagagacagaaagggtgattcgggaaagtgaggacagggaaagtcagatccaggaagaatctgaaggcatagccggtgaaacatttacggaaaacgatgtggaaacagaaacagggattgaagattcctatgtgtatgatggagaagttttctcggaagtgaatgaatacagcgcacgtgcggtgacaaaaggtaaaattgattatacatattgggcgattcatcagggagcaggttttggaaatattcttgaggatggacgtgacctggatcatgtcggctgtattatgctgaaggtgggaaatacctggaaaacggcttactgtgtccatcataatgctgatttgaagggtggccatgaatatgcggatacagcgtcatatttgacagattcgaataaaaagagactgacaggtctggctttatattatggttttcgtttttctggttggaatccggataaaaaaactgttccgggggatagcgataaaggaaaatatacagcaacgcaggtgatgatatggatgattgaaagaggctggtatacgtatgatgcgaatacatatgcttttcaattgaatacaaaggcaatcaatgcagcaaagaaaatctgtgataaatcggatcagagccctgtcggaagttcctatgactattttaaaacgatatatagtaaaatgcagacatttggtacagtgccgtcttttgcttatcggagtgagaacagtgcgcaggtcaggaatatggggtatgactttcaaacaaaccaatatgttctcaaactgacggatacgaataacgttttatccatgtatgatgtcagtgaagtgccgaatggtgtaacagcccaaaagacgggaaatacacttaatttatattcatcagtaccaatcacatctgcgggggtgataaagttgtcaaagaaatccttcaaagcggagaaagctgtgactgtgtggtcagaccagacaataagcggttatcagcaaattggaacttacaaagagccggaaacggcagatttgaatacctatctgaagataacagcgcagtctgtaacgatgacggctgaaaaagtatggaatgacagtgataatatttatgggaaaaggccatcagaactgatggtagatttgtatcgaggccaaagtaaaggggataaagctgtgcttgtaaaaacggtcatattaaatgcggaaaatgaatggcagtttacagtttcagatcttccgcagaaagattccgcaggcggacatatttattatatgtttacagagcgagaggcagcggggtatacagcggagacaacagagagtacagccgggacgcgtcattggaagtttacgttcaccaatacattaaatagcggtcatctgcagctgcttaagaagtcatctgatgaggcacttacaggtgggaatccctgttatacactgttaaatgcagaatatggggtttatacagatagaaactgtaccaatagtgtgggtaatctgatcacgggtgaaagtggatggtccaatacactgacatcacttgctgcgggaacatactatgtcaaagagagaaagaagccttccgggtatagaacagatgatgctgttcatgaagtaatgataaatgagggtgagacaaccgtgataacattgacagatgagccaatcatcagctggggacagtttcgaattgaaaaatcagcattggatggtgcatcagtatctgatacaattccattaacaggagcggaatttaccattgattattacagagaaacaggggtaacaaaggaaaacatttccgataaggtaccattaaagacctgggttgttgctgtgaaaaaaacatttgatggtcagaacacttcgtataaggcggaattagaggatacatatctgattgcagaaaagagtgacgaacttttcagggataggatggggaaggcggtactgcctcttggaacaattgcaattcgagaaacaaaggcagcagaaggctatttgctgcaggggtatgtcgatgatgttgatggaagacggctgaacaattaccctggggaatcagttatcatcaatctggcagatgacggtgaaagggcatcgtttttgggagaagacggattgaaatacagtaatcctgttttcagggtgacaaatgaattgcataaatgtagtatacagattatgaaatcctccgcagatggaaagccgttggagaatgtgatatttggtctgtacgatgaaagtcgacagaaaatcctggaaagtcagacgagtcaagatggtaggataatattttcggggctgcttccggggaaatactggttaaaggaagaaaaaacaggaaacggacagcagctgctgaaagaaccaatggaaatcgtgctgccgatggtattaacagagcaggacgttgaaaaactaaaaattgataaaagtcagctggtctatgatgaaaatcagcaggtatttaaattgtatgacagaatttttgagatatcaaatgcaggaaatttagtattaccgatgacaggcggtgatggattggtcttacctgacattctgtttttggcagccgctctgctgctgatcggcgtctgcttgtttgtatatcgtaaggggaaaacaactgcccgatgagtattcgacaattgtaagcgaatatggtatgattcttctatatcatctgaaaattcaggcaatcaatgatggaggaaagtatgcagcaatatgatcgaggatatagaagaaacgctttatggcagatgtcacctgtgaatacattgattattgtgattaatgtactggtatttgcgggactcagttttctgggagatacaacagatgtacgatttatgtataatcatggtgccagtttctggccggcaattattgaggaacatgagtattacagactgctgacatgtacatttattcattttggaatcagtcacttgttgaataatatgcttgtattggcctatattggtgataatcttgagagagcacttgggaagattaagtatttaattgtttatctggcagccggtgtgggatcaagtgcagtgtcagcagtctggagtatgatgaaagatgaatacagtgtatcgggaggtgcttccggggctatttttggtgttgtcggtgcacttttggttattgttataagaaacagaggacaactggaagatttaaatagtcatcagttgatgttgtttgccggattctcgatttatcatggtgtgatgagtgcaggtattgataatatggcacatatcagtggttttgtgatcggtgctttattgggcggacttctctacaggagaaagcggtatcggaagcagaatacaaaacgagctgccggaacctggtagggattttacagacaggtgaccgtgatgggcagaaacgatggattgaacgattgcaagtccaagcccggtgccgcctgtcttataggacacaaaaggctcaaaaatgtgagcctgctgttcgggtgtcatgccgttgccggtgtcactgacagaaagcataagatgattgcagtcatcgaagaaagcagataaggtaatttgaccgccgtcaggcgaagcttcggctgcatttttcagaagattaatgagtgcctgtcgaatcagtgacagatcagcccgtatggcaggcagattgggagcaatgtgaagatataaggcaatatgctgtgcgtgcagaacgggcaaaaaggatgtataaagctcattaagcagaggctgcagactgcatagtgtcagttggggctgacgtgcagtccggtcgtaattcagcagacgttggatatctgaaagatcattctggatttcagtgaagtctgaatcttctttcaagaaatcgtatcgggctgcaagcagctgaagccggctggaaatcagtgtcagagaattattaatttcatgtcgaagtgaagcattgcctctggtggaatcgtaagtcatctgaaaacctcctttgtgatgatttaataaggaaaaagtatctataataataaaagcctgtttccgcttttttgtgacagaaaattaaaaaaaaagctgttaagatttttcagtcgtggtaaaatggagattaagagcattgaaaatgcaaaaacatcaggaggtaatcaagatgatcgacagagattgtattttttgcaaaatagcaggtggtgatatcccttcatcgacggtatacgaggatgaacagttcagagtactgttggatctgtcaccggcaacaaagggacatgccctgattttgcctaaacagcattatgctaatatttttgagattgatgaaaacatattaagagatttgattgttcttgctaagaaagtggcatctgccatgaaagaaactttgaattgtgatggcgtgaatattgtacagaacaacggcgaagcagcaggccagactgtgttccattttcatatgcatatcattccgaggtacaaggatgatggtcaggtaatcggatgggagccgcatacttcagatcctgaagtacaggcacaattggcagagaagattggtcaggcaatccattaaataaaaatgaatcattaaatataagcaaaagcacgacagagaaaatgataatcaggaataaacagtgactgatcatttctgtcgtgctttttagattcggtattcaggatcagacagaggctaactgatcgatcagatcagcgataattggaattgcctgattttgctgacttgatgccatttgcttctgataattctcacggtcggagtagacctgatgaattgtgtcaaggaatttctcgtttgtaatctcttcttcagggagaagataactaaagccctgtttctggaaagattctgcattcagaatctggtcgcctctgctggcagcggctggcagaggaatcagaatattcggtttgcggagtgcgagaatttcacatatggcattggcacctgcacgggatataatgagatctgcagcagcaagaagatcgcgaagttcttctttgatgaattcatactgcacataaccggtcacattgttgagcgatttgtcagttttgcctttgccgcataaatggatcacctgaaaatcttttaataattccggaagtacagcgcgaactgcttcattgacagcaacggcaccaaggctcccacccataatcaggataaccggtttatcagatgtcaggccacagaaatgaagtccgcggctacggtcaccttcaaagagttcacttctgatgggagaaccggagagaacagccttatcggaaggcagatacttaagcgtctccggaaaattgcagcaaactttggaggcaacagggatacagagtttgttggccaggccgggtgtcatgtcggattcgtgaatgatcacaggaatcttcagggcatgtgcagcgcggacaacaggaacggcaacaaatccgccttttgaaaagactacatccggatgaatcttcttcaatcgggaacgtgcctcgaaataacctttgatgattctaaagggatcagtaaagttctttaggtcgaaatatcggcggagcttaccggtggcaattccgtaatagggtgtctttgtctccatgatcatgcctttttccatgccttcataagacccgatataggaaatatcgtagccgcgttttttcagctccggcatcagagcaatattaggcgtaacatgaccggccgttccaccgcctgttaaaactatttttttcataattcacggctcctttgtgatgataatttataaaattatggtaactgttcagagctaacatccaaatgcttcgcacttttgaacataaatccgcttggctctgaacagttacaaattatgcctgatgactggctttgtaagcctttaaggcctgagcaagctgatccggacatgatgtaccgcgattaccgcagttgatgccttcaagtgtcttgatgacgtcgtcaacgctacggccaacaacaagacgtgcaacaccctgtgtgtttcccatacatccgccgatgaattcacagcttgttacgatgttgttgttatcaacttcaaaatcaatttcacgggaacatgttctgcttgtagcgtatttcataattaaataacctctctttaaatattaatgtatttttatttggtttctaatgcattatatcagataatggcgcaaattcaaagcggtctttgcagtttttgaatggccagattgttctcttgacttcctgcactttcatagtaaaataggattgaaagtttgaaaatttggaggatttcagaatatgttaggtattataggtgcaatggatcaggaagtgaacatcctgaaagagaaaatggaagtgaagaagattgataagagagcttccatggaattctatgtcgggattttaaacggcaaagatgttgttattgtaaaatgcggtgtcggcaaggtcaatgctgctgtctgcacacagattcttgcagattgctatcaggtagaagcggtgatcaatacaggtgtggctggcagcctgagagcggagattaatattggtgacattgttgtttcaacagatgcactgcagcatgatatggatgcaacaggatttgggtatgaaccggctgagattccactgatgggtaagaagacttttgaggccgatgcttcactgcgcagtctgatcgcagaaacatgtcgtgaagtgaatcctgaaattggtgtatttgaaggtcgtgttgtaagtggtgaccagtttatttccgatggcgatgtgaaggacagactggtcagaatgtttgcaccatactgcacagagatggaaggcgcagcgattgcgcaggcagcatggctgaaccagattccttttgttattatcagagcaatttcagataaagctgatggaagtgcacatatggattattccgagtttgaagccaaagcaatcgaacataccgtgagactggtggaagctgccgctgcaaagcttgcataggtattattccagcttcaataattcagtcacgatttgacgaagtattaggcttatggacagcaatgtcgggaagacgacaggaaaaagaaagattccgtcaggttatgttgatgaattgcaagtggcaaagggcacaatattgattataattaagtgcaaataaaatgaagggggcacttaattatgaaagaatggatcgttttacagggatggccattgtatcttatgcttgggatgactggattaggtctgttgggaagcatattgagccgtatattttatggaaggcttgcaagagaggcacagttgtgtggaacatcggattatccgatgctgcattatataaggcagaagtacagcagttattataagctgggtatgcgtccgggcaatgcggaggcacttgtaaaaagatatcttgcattacatagggttggaccgttggcattgtacagctggaatgaagcagggaactttatgatgggtgccgttatgctgacgggacttatccgcggtatttacagatttcagacgaccatgcagacggggcctgcattgatggatattggcataggactggttctggcattgggattgcggttgaccgggaagatttttagtgttgaacgtctgcaggtgatcacgctgaatgcgatttgtgattatctggagaattatttgaagagcaagctggacggagaatatggttatggtccacagacagaaacaccggatcattatgcccgggctttgaaagaaacagcagcatcccgaacaaagccgggactgcggccgacaactgttcgacggatgccggctgaacgttcggaaacggtcgacagtacagtggatgcgaagattgtggaagatgtgctgaaggagttcctgtgctgaaaatatagtccgaattattgataaatagtatctgatttggtatgattaaatagaattaattaaagataaaattggaggaagaaaaatggcaaataaggttacatttgattattcaaagactgccgaatatattagtgagggcgagataacagccatgaagcgtattgcggaggatgcgaagaagcttcttttgagccgtgaaggcgaaggcaatgatttccttggatggatcgatcttccggtggattacgataaggaagaatttgctcgtattcagaaagcggcggcaaagatacagagcgattcagatgtcctgcttgttatcggtattggtggttcatatcttggagccagagcagctaatgaattcctgggacacaatttttataatatcattccaaagtcaatgagaaagacacctgagatttattactgcggtaataatttaagcagtgcgtatattaagggattgatggatgttattggagacagagatttttctatcaatatgatttccaaatccggaactacaacagaacctgcagttgcttttagagttttcaagaagatgcttgaagagaaatacggcaaagaagaagctgcgaagaggatttattgcacaacagataaagcaagaggcgcacttaagagcctggcaacagaagagggatatgagtcatttatcgtgcctgatgatgtaggtggtcgtttctctgttcttactgcggttggtctgcttccgattgcagtcagcggtgcagatattgaacagctgatggccggcgctgcatccatgcgaaaagtctgccttgagaatgcctttgaagaaaatgatgcactgcagtatgcagcagtcagaaacatccttttaaggaaaggcaagagtattgagatcacagcgagctatgaaccttccgtccagtatatcggagaatggtggaaacagttatatggtgaaagtgaaggtaaggataagaagggaatcttccctgcctcagttacattgacagcggatctgcattccatgggacagtttattcaggatggttctcgtctgatgtttgagacagtactttcagtagaagatccgggagcagagattattcttgaaaaagaggatgtcgatctggatggattgaactatctggctggcaagtctgtagatttcattaataagagcgcgatgaacggtacaattctggcacatacagatggacaggtaccgaatctgatggtgaagataccggcgcagaatgaattttatcttggtgagttattctatttctatgaatttgcctgcggtgtcagcggttacatactgggtgtgaatccatttaaccagcctggtgttgaaagctacaagaagaatatgtttgcattgcttggtaagccgggttatgaagacatgacagaagctttattaaagagattataaatcatttttaagagggcgcagggaatgatttctctgtgctcttttcgtgaagaagagagattctctgacagcaaagaaagtcggatattcaatggaatcagagaatatatatgggtgtgaaatgtaggaggacagaatgaagaaactgctaaaaaacggaaccattgtattggaagataaggttatacaaggggatttactgatagaggatgaagtgattgctgaaatcggacagaatttagatgcggagggcggacagatcatcgacgcgaccgggctggttgtattgcctggcggtattgatgtgcatacacacttcaatattgatgttggtgtaagagctgtagatgatttcagtacgggaacgatagcggcagctttcggcggtacgacgacaatcgttgaccatatgggattcggtccgaaaggatgcaatctgcatcatcagctgggggtttataaggggtatacgaatggcaagtgtgtaactgactatggcattcatggtgttttccaggatattaatgaggatattctgaaagaaacggaagtgatgatggcagatggtgtatcaagcttcaaaatgtatctgacttatgactacaaactggaagatgcagataccctcaaggtgttgaagaaacttaaagatattggcggcattacaaccgtacactgtgaaaatgatgcgattattcactatctgagagataagtttgttgctgaaggaaaaacggaggcaaaatatcacccacagtccagaccgccatattgtgaggcagaggctgtggacagaatgatcgcactggcaaaagcagcaggaaaggctccgctgtatatcgtacatgtttcggcaaaggagagtgttaacctgatcagggaggcaagaaaagcaggggatacggtctttggagagacttgtccgcagtatcttgtattagatgaaagccgttatgatgatccggtggaaggattaaagtttattttgagcccgccgctccgggctaaggagcatcaggaagctatctggcagggaatcaaagatgggacgttgcaggtgattgcaacagaccactgcagcttcgatttccatggagataaacaaaacggcaaagatgatttcacaaaatgcccgaatggtgcgccgggagtagagacacgaatgccaattgttttctcggaaggtgtatcgaaaggccgattgagtttgaatgaatttgcagcagtgacaagtacgaatccggccaaaatttttggtatgtacccgaagaaaggtgttctggcgccaggcagtgatgcagatattgtgctgatgaatccggatatggaagtaacgattacgaagaatattttgcatgagaatgtagattatacaccgtatgaaggcattcaggttaaaggatggccggtgatgacaatggttcgggggcaggcagtggtagaaaatgaaagactgcaggttccgctgggatttggacgctacattaacagaaaacctgttaaatatacggaattattaaagtgaacggccaatcgtgcagacggcattccagatagaagcatgaatggtatatggtaagtgcagcaatggagatatgaaaatggcagaaaaaaaggaaaaaataatttatataagtggacatagaaatccggatacagattccatctgttcagccatggcattagcagatctcaagaacaagatttcagccagacaggtggcagatgagcatgcagatagagttgtgtataaagctgttcgggcgggacatttgaatcaggaaacccgatatgtgatgaaggcatttgatgtgacggctccaacctatatgagagatgccagaacacagattaaagatatatttgatgataaaacacagagcgtcagcggcaatatttccctgagacaggcatggaagacaatgcgtgcagtcaaaaaagcgacccttgcaattacagacagcaagggtcacctggaaggtctgatttcaacgggagacatagcaaagtcctacatggctgtttttgataactgcattctggcacaggcgcatacaccttatgtgaatatcattgatacagttgagggcgaattgctggccggtgatgcaaaacagtgtgtaacttcaggaaaggttgttatttcaacggccaatacagagattattaaggaccatattgatgccggtgatgtcgttattctgggaaatcggtatgaggcacagctgtgtgcactggagcagcatgcctccgtcattatcgtgtgtgatggtgccccggtttcacgaacaatcagaaaaattgccggagacaatggatgcgcggtcatcagtacggcttatgatacatatgcagtagcaagactgatcaatcagagcctcccggtttcttactttatgacaaaagagaatctggtggtttttaaagaaaacagttatgtggatgatatcaaggatatcatgatgaaagaaagaatcagagatttccctgttgtgacggaagatgattgctatgcagggatgatctccaggcgtaatctgattgatatgaacaagaaaaaatttatcctggtggaccacaatgaggcagatcaggccatcaatggcattgaagagactgaaattgtggagatcatcgatcaccataaacttggaacgattgagacgattaaaccggtgaatgtacgaaaccaaccggttggatgcacagcaacaattatttatcagatgtatattgagaatgatatagaaatttcaaagacagtggccggtctgctttgctcagccattatatcggatacgttgctgttccgttcaccaacctgtacaccgctggatgagctggcggctgaaaagctggctgaaattgccggattggatatggaagcccatgcggtagcaatgtttgatgcaggcagcgatttgaaatcgaagacgaatgaagaaatattatatcaggattttaagaaatttaaatccggagatacaacatttggtgtgggccaggtgacatcgatgaatgcggaagaactcaagaaactgaaggataagatgaaaccgttcttggaaagtgcccggacaaaagagaatatagatatgcttttccttctgctcacagacattctgagcgaaaattcttatgtgatttatgccggtgcgggggcagaaaatattctttcccagggatttaatcagatgccggtggatggagaagcccttcttgagggtgttgtatcacgaaagaagcagtttgtgcctgtaatgatgggtatgttgatggcataggaggaatcggaaatgagcaatgaaaaagaaatatttgtcataggtcataaaaacccggatacagattcaatctgctcagcaatcgcctatgcatattttaagaaccagatcagcaaaagcaattgttataaagcaaaacgcgccggggaagtgaactcagagacacagtatgttctggacaaatttggtgtgaaggcaccggaatatgtggataatgtcagaaatcaggtcaaggacagtggattaaaagaagctgaacgtgtctcaaaggatatgtcggtcaaaaaagcgtgggaattactgagcagcaagcgtgaatctacattgacggttgtgaatgataatggcggcctggaaggactgatgacaatcggagatattgccaagtccattatggatgtgtccggtggaagagcattggcggatgcaaagacatcttacaagaatatcgttgaaacattgaaggcagaagtccttgcaggcaatattgaccataaaacggctacaggaaaagtaattgttgcagccgcaaatcctgatctgatggaggaatccattgaagccggcgacatggtcattatgggggatcgctacgaatctcagctgtgtgcgattgaaatgcaggcggcgtgtctgatcatcagtatcggttgtgaggtttcaccggcgattatacagctggcagaggaaaaaaactgcattattttaagaactgcgtatgacacatttatcactgcaaggcttttgaatcagagtatcccgattggctattttatgatcaagaataatctgacttatttcagaaccgatgattacacggaagaaattcgcagtatcatggctaagatgcgttatagagattatccggtcctggatagtgagggcagacttgtcggaatgatgacgcgtcacagcttgttggaaatggataagaaaaaggtcattctcgtggatcataatgagagcggacaggctgtagacggactgcatgaagcagaaatagaagaaatcattgatcatcataagctcggatttgtggaaactattcgtccgattatgttcagaaatcagccggtaggatgtacagctaccatcatttatatgatgtttaaggagaaaaagatggcgattcctgaaaagattgcaggtttgatgtgctctgctattatttcagatacgcttttatatcgttcgccaacctgtacggccatcgacaagattgcagcagaagaactggcagctatagcagggatagaaactgaggcacatgccaaggcaatgtttgcagcgggaagcaatctcagcaaaaagacaacagaagaaattttttatcaggatttcaaaaaattcaaatccggagatatttcttatggaattggtcagatcagttcaatggatcatgatgaactgacggcaattgtcgacaggttgacagaatttatggagaaagtacgtccggagaccggattgaatatgcttttcttcatgctgacagatatccttcaggagtcgacaacattgatctgtgtaggaccggatgcattgacaggcgttgcatcttacagtggttgtccggttcagggcaatacggtcattatggaaggcgttgtatcgcgtaagaaacaggtagtaccaacattaatgcaggcatttcagtcttaattgctgcaagtgttgaatgaagtcacgaacaatagaaaggcagagaaaatgagcaaacaattgtggaagccgggaaatatgctgtatccgctgccggctgttctggtatcctgcggggataaagccggcaattataatgtactgacggttgcatggacaggaacaatctgttcggatcctgcgatggtgtacgtttctgtaagaaaaaacagatattcacatcatatgctagaggaaaccggagaattttatattaatctgacaacagaggcattggcatttgcaacagattactgtggtgtgaaatcaggaaaggatttgaacaaattcgaggagatgcatctgacccctgagatggggatgctgtcatgggcaccaatgatcaaagagagcccggtatgtattgcctgtgaagttgtgagaatagaagaacttggcagtcatgatatgtttattgccaatgtcaaaggtgtttatgctgatgaggcctatatggatgaaaagggcaagtttgatcttatcaaagcgaaaccgattgtgtattcacacgggcaatattacggattaggacgttacatcggcaagtttggctattctgtgcagaaaaatcctgcaaaagtcaagaaagcctcagtgcataaaacaaaggccaagaataaaaaagcatgattgattacaggaggaaaacagtcatcaaaggtcagaaggaattaagatgcggctatacaaccggaacatgtgcggcagctgctgccaaagccgccgcggttactttgttgagcggcgaaatctgcagggatgtttccctgcagcttccgggaggcgagcatattattcttgaaactgagttcctggaatgcagtgaaaattgcgtgaagtgcggaatgataaaagatgccggagatgacccggatattacgaatggactgctcatatgcgcagctgttgagaaaacagaaggaaaaacaattctcatagatggtggaatgggcgtcggacgcgtgacaaaaccagggcttgatcagcctgtgggtgcagcggcaatcaattctgtgccaaggaagatgatccatgaagcagtggaagatgtgcgcaggcagtatgcctgggaaaaaggactgaaggtcactgtttttattccaaatgggaagaaaaaggcagaaaaaacactgaatcctatgcttggcattgtaggggggctttctgtgcttggaacaacaggtattgttgaaccgatgagtgagaaagcattaattgatacaattgcagtggatatccgaatgcaccgggcacagaatgaagatattcttcttatggctccgggcaattacggaatggattatctaaaggcggcttatcatatccatccagatcaggtgataaaaatcagcaattttattggagacagtattgatctggcggtttgtgaaggggcatcggggattgtccttgcagggcacattggcaagttgatcaaagttgccggaggaattatgaatacccattctcatcaggcggatgccagaatggagataatgacagcctatgcggcaatggccggagcggggaatgatattttgcgtcagattatgtcttcagtaacgacggatgccgggatggaaattctgctgcagtgcggacttttaacagagacaatgcagttaattcttgagaaaatagaggcacatgtgaaaaaaagagccggaagccagattgagattggcattattatattttcaaatgtattcgggatgctgggacagacagaaaatgtaccgaatctgtttaagaagatgaatgctgcacagcataaggaggaataatggtgagcggctgtttgtacagtgtgggtgtaggtccgggagatccggaactgatgactttaaaggcagttaagataattaggaattgtcaggttctggttttgccggcggaaaataaagaaaaatgtgtggcctatcagattgtgaggcgggcaataccggaaattgaagataagacaactgtctgtcttgtcatgccaatgacaaaagacaaagacaggcttgaaaaaagccatagagagggaacccaaaaggtggcagaggtcctggatgcaggaaaggatgcagcctttctgacgttgggcgatccgactgtatatgccacatccatgtatatccatcaacgaattgccgggatggggtatcggacatccattgtcagtggtgtgccttctttttgtgctgcggcggcaaaacttggcgtttctcttggcgagaagcaggaacagatccatattatccctgcaagttatgatgttgaagcggcgatacagcttcccggaaccaaaatcctcatgaaagcagggaaaaagatgccggttgtcagacagtgcgtcaaagaacatcatggatgggctgcaatggtggaaaattgcggcatggcagaagaacatctgtggataaatgcagaagatatgccggaacatccgggatattatactcttgtcattgtgaaagatcggaaggatgaagaagaatgatacattttgtaggagcaggaccgggagcgccggatttaattacaataaggggacaaaagctgcttgcaaaggctgatgtgatcatttatgccggttctctggtcaatccggcattgctggaagtaaaaaagccggaatgtgcagtttataacagtgcccatatgaccttagaagaagttctggatgtgatgaagaaagcggaacagtcaggaaagacaactgtccggctgcatacgggagacccaagcctttatggtgcgattcgtgagcagatggatgctttgaaaaagatgaatattgcatatgatatttgtcccggtgtcagtgcgttctgcggcacggcatcggcactggaattggaatatacattgccgggagtgtcccagacggttattatcagccgtacagcgggaagaacgccggtgccggagcgggaatctattcctcagctggcaagacatcaggcaacgatggtccttttcctgagtacaggccatttgccgaaacttcagaaagagctgctagaaggcggctatacagcggctacaccggctgcaatctgctataaggcgacatggccggaggaaaaaagatttttttgtacggtggggacgctggcggagacggcagagcgggaaaacattacaagtacagcattgattgtggtgggcaatatcatcggagaacagtatgatcggtcccttttgtatgacccttcgtttacgacggcatttcgagaagcaacagaaaccacgaacggatctgatacagataaagccggtatggatcaataacagtatgaaaacagcggttattagttttacacagaatggcaatgcctgcaatcggagaattataaccggcctgaagatggcaggctatacgacggaagggttttacggcggccgttataaagagaatgacagtttagcaaaagaaattttgcgtcctgctgccaaaaaggtagctgaatggacaaaggatgcttttgaaaagtatgatgctattgtatttgtcggggcagcggcgatagctgtgcgcagtattgccccctgtctgaaagataaattaaccgatccggcagtcttagttgtggacgaaaaaagtcagtatgtcattccgatactttcaggtcatgtgggaggagccaatgcactggcagtccagctggcagcgtatttgcaggcaatacctgttatcacaactgcgaccgatattcagggtttgtttgccgtcgatgtgtttgcagtgaagaatcatttgctgataacggatcgaagaaaagcaaaagagatatctgcttcgatccttgaatatgaacagaaattggtttatgcggatgccatgctgacacatgaagcggtgctaccgaaatacctgagtataacagatgaagttgaaaaggcggatattattattgattatcatcggttgtccggcaatatgaaaggactgcagctgatacctgaaaagacagtatggattgggatcgggtgccgtaaaggtacagagactgacataattaaagcagcaatcagatattttttgacggaacatgcgattgatgaacggtctgttgccgggatagcttcaatagatgtaaaagcacaggaacaggggattcttgatgcgtgcagagaatataactggccttttatcacattttcagcggaaaaactgtgtgctctggagggtgactttacagcgtctgaatttgttaaaagtcatgttggtgtggataatgtctgtgagcggtctgcactttgtgcggccggggagaatgaagaaaacggcatcatcggacatggagagaccatacttcttatcagaaaggaaattatgcctgggattacattggctgcggccggtacaggcaggaggttaagatttgagtaagttatatgtagttggcatcggaccgggcggttatgaacagatgacagtaaaggccgttaaggtgctggaagaatgtgatatcattgtggggtatacggtatatgtggatttagttgcggagcattttgcaggaaaagaaatgctgacaacaccaatgcggcaggaagagaaacgctgcagaatggcatttgacgaagtcatgaaaggtagaaatacagcgatgatctgctcgggagatgccggtgtatacggcatgtcaggccttatttatgaaatcagtcgtgattatccggggattgaaatagaaattgtcagtggtgtgacagcagctttgagcggcggtgccgtacttggagcgccgctgatgcatgattttgctgttattagtctcagtgatctgatgacgccatggacgttgatcgagaagcgtctggcagctgccgcaagtgcagatatggctatttgcctgtataatccgtcaagtaaaaagcgcagggattatcttaataaggcctgtcggattgtgatgcagtctgctttgccggaaacagtctgcggtattgtcaaacaaattggccgtgagggtgaaagttgtcaggtcatgacgcttcaggaattgtcgaattatgaggcggatatgtttacaacagtatttatcggaaatagtacaactaaagtcatcaatggcaagatggtgacgccaagaggctataaactgagtgaatagcggtaatcggagggattgaggagcgtttacctgcggagcaggccgctgacaagaacaaagtagtgaggaagtcggccttcttccatccattcaaggtcaatgcccatgcattgactgagggtcagaccgacattgccgccaagagattcgatggaataacggagtttgtcgggataacggcatggcaggccgtcgggacgtgtacaattgtcatggcacaggctacaggagccggctgaaagactgacggagccggggtatttttcttcaagtcggaataattcccggctgatacgggctttttcgacattgagggattgacgcataatatcggcaattttgtgttccgagaattgttttccggcatagtcatcattatagaggattttgaccgcaaatagatccagtgtctgaaactgattccagaaagcctccacatcgaaggtgtaggaaggacaggaccagagtctgtcataattgggacaggctttgcagtattcagtgaaagtgggaatatcgatatatctttttttataatcactgacagcgatggatgttgtgtaggattcggttgtgtacatggctgattcctcctttttatctatcataccttaaaaagtgaagaatgtataggatacttttggttaagatgcctatttcacttttgaaagcggtaggttatactatcacgagataaacgcaaataaacagttacaataattgttaaaacaatagaagataaagatacatacaatgaaggagatgctttgaagatggaaaaatctaaagttttttttactgatttcagaacaccggcttatggagatggcttaacaataaaactgcagaaactgctgaaaaaagcaggcattgagcagttggatatggacggtaagttcgtagccattaaaatgcattttggtgaattgggcaatttgagcttccttcgcccgaattatgccagggcagtggctgatctggtaaaatctttgggtggcaagccgtttttgacagattgtaatacgatgtatccgggcagcagaaagaatgcccttgaacatatggaatgtgcatggcagaatggttttacaccgctgacggtaggatgtccgatcattattgcggatggtcttaaaggcacggatgatattgatgtacctgtagaaggtggtgaatatgtcaaagcagccaagatcggacgtgcagtgatggatgcggatgtctttatcagcctgacacatttcaagggacatgaaacgacaggatttggcggcacgatcaagaatatcggtatgggctgcggttcaagagcaggaaagacggagcagcacagcaacggtataccaacaatttcatcacgtaaatgtgtaggctgcaagcgctgtcagaaggaatgtgccaacggcggacttgtattcgatgcagaaacaaagaaaatgactgtagatacagaacattgcgtaggttgcagcagatgcctcggcgcatgtaattttgatgctattacattcagaaatagcaatgctaatgctattttgaactgcaagatggcagaatatacgaaggcggttattgacggaagaccgaatttccatatttctctggttcttgatgtttctccgaactgcgactgccatggagaaaatgatgtgccgattctgccgaatatcggtatgtttgcttcttttgatccattggcccttgaacaggcctgtgtagatgcctgtctgaaggcagaaccgatgccgaacagccagctttcggataacatgagtcgaccggattttgtcgatcatcatgatcattttacgaattccacaccggaatcagagtggcagtcatgtctggaacatgcagataagattggcctcggcagcagagattatgagctgattgtctgttaataggcacagagatgataaggtttccgaaattccagtcggcgtatgctgactggaattttgtgacaggttttatggatatttgaatgaccttgagggaggatgaagatgagcagaaatgctacaaaagatttgacaacgggttcgccgatgaagctgattctcggtttcggcattccgcttttgtttggtatgctgtttcagcagttttacaatatgatggacacgatcattgtcggaaagtttctgggtgtcagcgccctggcatctgttggagctaccgggtctattaattttatgatcattggtttctgtatgggtgtctgcaatggttttgctattcctgtggcccagcgttttggtgcaaaggatgagcatggtatgcgaaaattcgtggctaacagtgtctggctgtcgatcatatttgcagtggttatggctgtattggtctgtgttttctgccgccagatccttgaactgatgaacacgccggaggatattattgatggctcctacagctatatttttgttatttttcttggtataccggcaacttatatgtataatctcctgtcaggcattatgcgttcgctgggagatagcaagacaccgctgtatctgctgattttttcatcaatcctgaatattatactggatttgctgtcaattatcgttctgaaaatgggcgtggcaggtgctgcatgggcgacagtgatcgcacaggccgtctcaggtttttgctgtctgggtgttatctggaagaaattcccgattctgcatgttcagagagaggaatggcagccggataaactttgcatactgaatttgtgcaatatgggtattcctatgggattgcagtattccattacagccatcggaagtgtcattatccaggcggcagtgaattcactgggatctgtggcagtcgcttctgtggcagcggcggtcaagatcaatatgttcctgtgttgtccgtatgatgcgatgggttctaccatggcgacctatgcggggcagaatgtaggagccggcaaatttgaccgactgaagcagggagaaaaatcctgtacgctgctgggacttgtttatggtattgcagcctttatatttattctgctcttcggtaaatatctggcattactttttgtggatgccagtgaggaggtcattatcaatcaggcacatcttttcctgatgtgtaactctgcgttctatttcccattggcattggtgaatattttcaggtttaccatacagggcatgggattcagccgtctggctattcttgcaggcgtgtgtgagatgattggccgaacagtagtagcctttgtgtttgtaccaattttcggatatccggcagtttgttttgccagtccggtggcatggatattggcggattgtttccttgtaccagctttctttttctgtgtgcgcagtctggaaaagcgggcggcattggaagatagacaggcggtattagaagataagcaggaggataaaaattgaaaaagatattaatgatcgcaacaggcggtacgattgcgtcaaaaggaacagcagacgggctggcaccggagctgacatctcaggatattttgcattacattccgtcgttgaaggacatctgtgaagtggaaacactgcagttgtgtaatctggacagcactaacatttccatggaacattggatgatgatgaccaatgcgattgaagaaaaatatgaaaaatacgacggctttgtgatctgccacggtacagataccatggcttatacggcttcggctttatcttatctggtgcagcattcaccaaaaccgattgtcctgaccggttcacagaaacctgtggatatggagattacggatgcaagggccaatcttctggatagttttatctatgcatcctcagatgatgcctgcggtgttcagattgtcttttccggaaaagttattctgggaacaagagccagaaaagtccggacaaagagttttcaggcttttacaagtattaattatccaagtcttgcagtgattcaggatggccgtaagattcagtatatccatcaggtaaaagctgcaacggcggagttttaccacaaaatggacccgaaagtcggactgctgaagctgattccggggattgacggggactatctgaggtatttccttgagcgtaatgatgccattattattgagagtttcggtgtgggcggtctgccaatgggtgagcgttatcatttcggtgaggcgattgagtggggcatcaatcagggcaagaccattgttatgacaacacaggtgccgaatgagggcagtgacatgaccatttatcaggtgggacatcatctgaagcagtacgacagtgtgttggaagcttatgatatgacaacagaggctgtggtcacgaagctgatgtggattctggggcagacaagggagcctgcgggaatacggagattgttttataccactgttgcgcaggacattctgtacaatgaaagcagatagaaaaatgcagcatgactttatttgaaaaataagatgtataaacggaaacaacaacttaaaaaagaggaatcctgtttatacaaacgataaagtatagacaggattcctgctatattagctacaataactaaagaaaagattcaagataaaatgcgacaccatcttcgttattagaacgggtgacagccgaagcggctttcaggagattggatgtcgcattttgcattgcgacaccgcatccggcataagataaaagctcgatgtcgttatcactgtctccaaaggccataacttgtttcggggtaatatgaaactgcgcagccagcgcatgcagggcagaggctttgctgacagagccggaggccatttctatgtaatagctttcagaagatgtgatatagagattcgagatttgggataaggcagtgatcagctgctgttttttcggcatatcaggaacaatcatatcaatgccttcgatttcgttacaatgtttcatcataaagtccggcatatcagaaatcggggtgcgggttgtttggacataatgattcattcgttcgggaacgccgaaatcagttggacaatcgtaataagcctgcatcgtataagcatgaccgccgataaaaacttcaaaggggaaatgtgtatcctgcataatggcaaggacgctcattacgacaccgggtttcatatcattggcataaattctgcggctgtccggcagttcaaaaatactggatccgttggaagtaatgatatattttaatccgcgaatgttcagaatatcctccggaatggcggataatgcacgtccgctggcaatgacaacgagaatgccttttgaaagtgctttttctaatatttcttttgtataagggctcacttttccctgactgttcaaagtggtcccgtctaaatccagagcaattaatcgtaaatccataatatttatttctccgcaatcattttaaaattctatttatttcattataattgaatcccggttttaaaacaagtgcatacctgccccataccgcacatatgattaaaaagtagtcagcgatttgcagcgggtatgggagggcgagtgtgtggaagaaaaaatcaaagatgttctggatgcttatacgtttcagacaacccgggtctgtcgtgggaggggtgcatttatctgtgacacggaccagggaatgaaaattgtcaaggcgtatcaccggtcaccccagagactggagtttgaacagctggtcaaatatacaatccgcgacagagggtattattacgtggatcagctgctgccgaataaagaggggcagtatctgaatagcaataaggacggtcagatgtacaccgtgagagactggtttgaaggacgtgaatgcgatgtgaaaaatgcagcagatgtcctggcagcggtgcggcagctggccgttttgcatatgctgatgcgacggtgtgatttgtcggaggatcgggtggaacaatttagttttcaggataccagacagatttttctgaagaggagaaaagaattgagagctatttacagctatatccgtcagaaaaaacaatggaatgattttgaaaaattgtatatgcagctgtatggtgattgcatgaaagaggcagatgccgcccttagtgaattaaatcaattcgactttgatggtctgcgaaagaaagccctggatgagcggacactgtgtcacggggattttaattatcatcaggtgatcttaaaccgaaaatatacggcagtggtgaattttgataaaatgcattatgatatccaggtgaaagatctgtatcaatttctgagaaaggttcttgaaaaaaataactgggacagttccctgggaacaatgatcatggatacgtatctgtctgtcagaacactgtcggaggaggaaagacgtgtactgtatgcgatgttgacttttccggaaaaattctggaaaatatcaaatcgttattacaattcacggaaaagctggatttccagcgtcaattatgacaagctttgtcgttttaagaaaacggagggacagaggcaggattttctgaatacattcaaatatgcctttattttttaggcatcctggagtataataaaaccaaataaagataaagggaggtcattccgatggagtataaagaagtctacgaaagctggcttgcgaatccttattttgatgaagcaacaaagcaggagttattaagtatcaaggatgacgagaatgagataaaggaacgtttctatgcagatctggagtttggtacagcaggtttgagaggtgttatcggagccggaaccaaccgtatgaatgtttatgttgtccgcaagacaacacagggtctggccaattacattatcaagcagaatgcggcagacaagggcgttgccattgcatttgactccagaagaatgtccacggaatttgccaatgaagcagccttatgtcttgcagccaatggcatcaaggcttacatatttgatgcactgagaccaacgccggaattatcttttgctgtcaggtatcttggctgtacagccggcatcaatatcacagccagccacaatccaccggaatacaacggttacaaggtttactgggcagatggcgcgcagattacaccgccgcatgattcagggattatggcggaagtgaaggctgtcacagactataatgaagtaaagacaatggatcgtgatcaggcaattgctgccggattatatcaggtgatcggaagtgatgtggatgatgtttatatcgctcagctgaagaaacaggtgaagaatccggagctcatcaaagaatatgcagatcagattaagattgtatacacaccactgcatggtacaggcaatatcccggccagaaggatcatgaaggaaatcggtttcgagaatgtttatgttgtaccggaacaggaattgccggatggtgaattcccgacagtcagctatccgaacccggaatcagatgaggcatttgtccttggattagagctggcgaagaaagtagatgcagatcttgttcttgcaacagatcctgatgcagaccgtctcggtgtcagagtgaaggacagagaaggtatttaccatacgctgacaggcaatatgtccggctgtcttctggcagattacacaatcagccagatcaaggagaaacagggactgccgaaagacggcgcactgatcaagacaattgttacaaccaacatggcggatgccattgcgaagtattacaatgtgaatctgatcgaatgcctgacaggctttaaatatatcggacagcagatcctgaagtttgagacaacaggtgtcggtacgtatctgtttggttttgaagaaagctatggctgtctgatcggcacacatgcccgtgataaggatgcgattgtagccacaatggccctttgtgaagcagctgcttattataaatccaagggtatgaatctctgggatgccatggtagatatgtatgaacgctatggttactataaggacgatatcaaatctatctccttatccggtatcgaaggccttgcaaagatccagtctattcttgaagcactgcgccagaatccaccggcagaaatcggcggttataaggttgtatccagaagagattacaagaaggatgagattgttgatctggccacaggtgagacaaagccgacaggtcttccgtcatccaatgttctgtactatgacatgacagatgatgcatggttatgcgtcagaccatccggtacagagccgaagatcaaattctattatggtatcaagggaacttccctggcagatgctgatgagaagtcagaagcactcggcaaagccgtactggccatgatcgacaaaatgatgtaaaagaacgcgcgattcagaacttaaagaagggattcaaaaaagttattccgcacaggaataagcttttttgaatcccttttcgtagtttttgatttcgcgcgtttcagtttgttaatttataaaaaattctgaaccgcattcgtaggtttattgctgcgtgtctgtttcaggccatggcaggagtgtattctgaattgctgtcagagtatcttcggaaatggtatataggccgtcactattcttttctaaggtgatatccaatgttgtggcttcaccaaaggtcatgtctgccagatgactttcaaggatggtcagtatcccatcaagataagtgtcgtagtaggcttcttctgtcaggtcggcataggagaagtcggcgtttttttcattaaaagaatgaacatagacctgaatggcatcgtaattgtccttcaggatattcagcggccggatggacaattgcacagtctggggactgccgtctgaagcgggtgtttcagcggttacctcatagctggcattagcatagagctggttcagcagagcgatgatccggtctgtggtttcttcggatggcgtgccggcgccaaaagctgtcataaaagcttccgcagaggatgtaagccattgatcacggtaaagagaaacatccgagcgggagacgccggtaaaatccatataggatgtatagttacctttgtacagggtatccatgatcgaagtcacgtagccgctgctgtcaaaattgcgcccgcatcctgtcagcatcacaaccagcagaagcagacagggcagagaatatttgaatttcataaacaacctcctttatcatgcaacaatgctcattttatcataattttatgggtgatgtgaataaaataccatcaatttacataaacttgtcaatataagatagtctgacaggcgtatcggagggaaacatggcgggaaaagtatggaagataagtatatgtatgatgctgacggttttattatgtgcatgtacggaaaatgacatgatggaaaaaaaggtgcgggatttggattttacagttgtgagtgcagaggatatcagtgaggaactgaagtcacatattgatgagcgaaaggaagaaacctttacactgatttacagagatggtgagaatatgtatctgattgtcggatatggcagtcaggaaggcggcggttacagcattagagtcaatgatctgtatctgggagagcagtcagtctgtgtcagtacatctttggaaggcccgggatccggcaaaaacacggagagcgagatcggagcgggaactgtatcgtatccgtacattgtgattaagctggagacattggatgctcccgtcatttttgacatatagaggccgggatatatagggaaaatgctgtcgaattttgcgtatacgatgaaattatgaagaataaagtactaaaaaaatcgtgaaaatctacaaaataaacacgtatattgagaaaaataagtctttttactgtgcaaattgacttttgatgaaaaaagagttaaaattattacaggagttttatacattattactaaacggtagtgaaagtcctttgaaagaggtgaacggatttgcagcagaaagatattatgaatgtcaggagagcagtagatgcgaatatcggacgcagagtacgtgtgagagcgaataaaggccgtcataaatactcagttgccgaaggtgtgatacaggagagctatccaagcatatttacggtaagaatcaatgcagatgaagataacgctgagagagtggtatcgtatagctatacagatgttctgacccgggatgtgcagctggttatttgcaagtaatccgcagatttcatatataacgcataaatcctttcttacaggcatatcaataggatatggatgtgaggagggattttttatgttgacagatacacagatgctgcaggcgatgcatttcagatcctcagtggctttacaggtgacactggatcaggattataacgtgccggataataaatcggacattgaaaaagtgattgtggagaacggcgaaatacagatacagaatataaagacgatgccggacaaaatgattttaaaaggcagtctgttctggagaatggcttatttaaaagatcgccagaattgtacactggaccatatggaaggtgaactgccttttgaagaagttgtcaatatggacggtttgacagaagaagcgagaatacgggtggattgtgagatggaagatctgagagtgaccatgatccacagcaggaaagtcagtgtcagatccgttgtcaatgtaaaggtccatgcgtctgcggtggaagagatacctgttgtcagtgaaatatcggatacagagaaacatttatgtctgcagcgacgaacacttgatgtcagtgggatcgctgtacggaaaaaggacacaatccgtatacgggaagaaatgacgctcccgggtaataaggccaatatgctggaactgatctggggtgaggtccagaaccgacgcgtggatatacggccccaggatgataaactgctgctgaggggagaggcttctgtattctgtctttacagcggggaaaatgaagaaaatccttttgaatatgcagaagcagatctgccatggcaggcagagcttccatgcagcggcatgagagaagatatgatcgtcaatagtcatttacataaaatcgctcagtccctggaaatgaaagcggatatggatggcgaaatgcgtctggtgatggcggagatggttctggagattgatcttgaagcgtatgaagagaaaaaactgcagactgtatcggatgtgtacagtctgaaacgtcagttggtgccggtttatcaggaggcagcgatgcgccgggtatgcattcgcaatcagacagagtgtaagttgtatgaaaaggtgcgcatgccgggagaacatgccggggttctgcagctttgtcatccatgggcagaaatcaggatggaccgtctggaactgacggaagaaggtataagggcagagggtgtggcggatgtgcatattctctatgttaatgaggatgaccatctgcccctggatattgccggtgtgatgatcccttttgcctgtatgattgagaccggtgtattgccgaaggatgtttgttttgaagtgcagccgtatctggatcagatcagtgccgtgatggcgggcggtgatacggcagaggtgaaaatgacggttcgcctggataccctggtctgccaatatatgacgatccatgtgatgacggaaatctctgagggtgaggccaatgacggatatatggaatctttgccgaatatgacaggctatgttgttaaaaagggtgatacattattttccctggggaaacagttttgtacaacagcccaggaaatccggcggctgaatcatattgaaaaggaagagatctctgagggggaacgtctgctgatcatgaaacagatgagtttttgaaagattccgaaaaaaagtattgcaaaattgcagattgtattttacaattatattgtatacacgatacacagagacatacataagatgggagttgaaaccacctctaaggggaatacagggggaatcattatggatacgatcagactaaaagccagagcgaagatcaatcttggattagatgtggtcagacgcagagaagatggctatcatgaagttcgaatggttatgcagatgctgaagctgtatgatcagattgatatagagaaaacagagacaccgggcatccggctgacatgcaatttatccttcctgccgacggatgagcgcaatattgcttacaaagcggcgaaggttatgatggagcagtttgacataaagcagggtgtctgtatccacattgagaagcatataccggtggctgcgggaatggcaggcggaagtacggattgtgctgctgttttatacggcatgaataagctctttgatttgcagctgagccagaagaagctcagggagatcggtgtgaagctgggggcagatgttccgtattgtctgatgcgccgcactgcattgtcggaaggaattggtgagatcctgacgccggtggcgccgcttccggattgtccgattttaattgcgaaaccatccatcagtgtgtccacccgttatgtttatgagcatctgaaattgaatgaagagaccctgcatccggatgtggatggcattgtatcagcgctgaaggcgaaggatctttatggtgtcacggatcgtcttggcaatgtacttgagactgtgacgattccggaacatccggtcattgcagatattaagcagcagatgatgcagtcgggggcagtgaatgctttgatgagcggtagcggaccgactgtattcggtatttttgatgatgaagacaaggcgaagaaagcctttgaagatatgaaagccagcggcttggcgagacagatttatctgaccagaccatttaatcagaaaataaaaagcacacgtaagaatcaaagaaagaggtaggcaggatgaaggactttgaaatgacaattgatgaatatctcccattaagagatgttgtatttaatacattgagaagagcgattctcaaaggagaactggaaccaggagaacgtctgatggagattgcactggccaacaagctgggagtcagccgaacaccgatccgtgaagcaattcgtaagctggagctggaaggccttgttgtgatgatcccgagaaaaggtgcagaggttgcacggattacagagaaggatctgagagatgtattggaagtccgtacttccctcgagaaattggcgatcgagcttgcctgtgacagaattacagaagatgatatccatgatctgaagcttgcatgtaaggattttgaagagtcttttggtaaggatgatctgacaaccatcgcagagaaggatgtggctttccatgatattattttcagatcaacgaagaatgccagactgatccagattttgaataatctccgggaacagatgtatcgttaccgtctggaatatctgaaggatacacagtcccatgacaggctggtggaagagcatcagaggattgtggatgccatcattgacaagaacaaagaagaggcagttcgcctgatccaggaacatatttatatccaggagctgacagtaatcaagaagcttcaggagcaggaagcataaaaaagcagcatttgcagagaataaagatattgcagcagacaatggtctgcttgcggtatctttatttttttaggaggctttggaatgcacaataagattgaaacagagctggaaacaaatatccgttatatagaatcccgttttgaaggctgtgccgatgccgtcatgcgccgaattctggtgggtgatgaaaagctgggaatgtatgttgtttatatggattccatgtatgaccgggattttatagatggtgttgtactgaaaagtctcctttttgatcggatacagctgccagatcaaaatgccgggcaggtgatttttaataaatatctggcgacagcagatgtgaaggaaaccaatcggatggagatgctgattgatgaggtcctcaaaggcaatacggcgattctcattgacggcatggcaaaggccatgattgtttccagtaagaatctgccggggcgcggggtatcagaggcggaaacagaagtgtctgtcagaggttccaaggaaagctttacggaatctttcagggtgaataccgtgctgattcggcggcggatcagagatacacggctgaagagccggcagatgaccatcggtgtccgttcaaaaacagatgtggcgttgatgtatatggaggatctggtacggccagaaatgcttaagcaggttatcagaaagctggagagtttcaaaattgatgcgatccttgacagcagttatctggaatccctgacggaagaaaaatggtactcgccgttccctcagtatcagtccacagaacggccggataaggcggcctcagcccttttagagggccgtatggtgttggttgtggacaattcccccatggttcttttgctgccgactgtgtttgcatgcttttttcaggcatcggatgactactatgaccgttgggatgcagcgaatttcgtacggatactgcgttatgcggcggcattttttgcagttcttttgccgggaatgtatattgcactggcaggctttcatccggaggcactgccgctgagttttgcactgagttttgcggcttccagggagggtgttccgtttacgctgccggtggaggtggttgtgatggagctggcatttgaattgctgcgggaggcaggcatcaggctgccgggacctatggggagtacgttggggattgtcggcggtctgattatcggtcaggcggcggttgatgcgcatattgtcagtccggtggttgttattcttgtggctctgactgcgttgtctgcttttactattccgaatgatctgtttgcatctgcatttcggatgattaaattttattttattgctgcagcatccataggcggttttgtgggactgacagcggccgtactgaccgtattgactcatctgtccggtctgaaaagttttggtattccctatatgctgccctttgtttcggcagagatggctccggaaggcaagtggcaggacaatatctggcgtatgccgttaggaaaaatgtatgagcggccgtattttacccggaaaggacacagacgcagactgagaaaggagaggaaaaatgatatcagataatcagatgatctccgggcgtcaggcatcctggatctttatgctggatatgctggcagcggggcttttttcactgacagcagcaaaggaacaagcttcatcgctgacaatgcttgtgggcagtctgctgacaattggtctcgtgctgatttattataaggcatctttttgtatgtttgatcagtatgaaaaaaagacaggcatcagactctcagaacaaaaactgccgggaatactctgcctgctgtggctgattttttatctggcaggactgatatgggctttgcgtttttattgcgctgtgatcgcagacagaataccggttgcgtatggccgtgtgctgcccatcatttttctgatggcagcgttgatttatggcgccggaaaaggtatggaggtgcgggggagaatgtcagaactcatgggatggctgatttgtctgccgttgatccttctttttatatttggtctgcagcaggtgatccaaagcggctgctggcggtatctgatggttgaaagcgtgaagcaggaaggtggcatcagcctgcttctgatgctgaaaaacggtttggccggtgcggccttttttctgctgagtgaccagccgctgctgttgtggcggtgcattcaaagacagaatcggcgaaaaggcatctatccggtggcctttgccggtgcaggactcatgctgttgtttagtacagggctgacagtctgtctgctgagtccggagggcattgcgggtgagcggtatccatttggggtggtgctgcagctgatccgatttccaggaaacttcatctcacgttatgatatcttctttgtcatgctgtggatgatgagtttttttgtttttgccggcggcatgctgatacatctgacagtggctgcaaaaggactgatccggacagaaaataaagatgcaaaaatggatagaaaactggcactgctttttggaatattgatcacagcggggcttctatgcggctgttatgcagagcgagagcctcaaaaccgcaattatattatgtgtatgggcatagacagtgatccggagggcggtttaaaaatcagttatggttttccggatctttctgctctgacagggacggatgcaggggaggctgagccgatgcgggtaattgcggcagcatctgtttcagaagcatcggaacttctgaatgcatcctcggataaaacaacggattacagccagatgcctgttattttgatgggaaaagatttatttgaggatcaggaaaaaagaagccaggtgatgaatgaactggcagatgaaaagaccatacgaagaacggcacttattgctcgtgccgaacatactgcagaagatattttacagctggatgacgatgtgcatggctctgttggggtttttatctatgaactctgccagaataattatgaaaataaaggctgtaccatgagtattctggaaaattttatcggcggcagggcaggagatgaaaccgtgatccctgtgtttgaaaataacagcggtgttccggaaataatcgaactaattagctataaataattcaaaaacagagaaagatatggtataatttcaacataggcttttatttccatgtgtcatttccgacatgatgcagtctgtgaaaattgtacgcagagtgaatgaaatagccgggagagaataacgtctgaaagagaaaggaattgatatgacagagaacgtcattttgacagtcagaggccaccagacagatctcggtgaagatgcaactaccgagctgatcgccggggcggcttattactatagaaacggcaaacattatattctgtatgatgagattgatcctgaaagcggtgagcagtcaggcaatacgatcaagatcggcgaggatagagtagatgtgatccgacgcggtgcgggcaaggtccatatggtatttgagaaggagaagcagatttcttcccagtaccatacaccggccggagtcatccagatggagatatttacatccagactgcggacaaggcaggaaggggagaacattgagacagagattgtctatgatcttcatatgaatgatgtatttatttcagaatgtcgtgttgtgatcagggttgcgtctaaagagaaggccgagctgcatataatataattataatataggagtaacagaagatgaaacagaatggagccgtttatttttataatttgaattcggaaagagggcggcagatccgcatgttgtgtctgacactgggattgaagatccgtgttgtggaccgggcgcagtacacagaagccatcggtgcgattgccggtgtgccgggatattccctcagcggagagacttataaaggcgaaggttttgaagatgagatgctgatcctgaagggatttaccggcggtatgctggatagttttcttcacggcttcagaaagatgaagattcagccggttgcgttgaaggcggttttgacagaggcgaattgcggctggaattcactggaacttcatgatgagcttgtgaaagagcatgagagtatgcacagtcagacaccgtccgaagtgacagacaataaagagacagaatagggggagttaagatgtcggatcatttaattattgctttaaacagagagtacggcagcggcggtaaggagattgccgagaagcttggcaaacgtcttggccttgaggtctatgatgaagatattgcggatcttgcggcaagacgaagcggtatcaggaaagattatttcgaaaaagtcgatgagaagccgacagacagttttctgtatatgctggcgatgaatacttttacgatgaatacatccatgaatccttttgagaatactttgtccagtgacaaattgttcaacaagcaggcagaggttattcaggagatcgctgacaaggatgactgcattattgtcggacgatgcgcaggctatattttacgtgatgaaccgaagtgcgtcaggatctacatcagtgcagacaaggatttcagaacgaagcgcatcatggcttcggatcatctggatgagaaggaagcacagaagaagattcattccatggacaagaagcgtgacagctattttggctattatgcaggacaggattggaaggcgtgccatacatatgatctgtcgattagcaccagttcccttggcattgacaaggcagtggatctgatctgtcagtacattgatatcaagtttaagtaaattaccatttactttttatgaaaatagggctataataacattgtcatgaccgatattgactggttgtgaccgacaatgatcgataatgatcgacacaatctatggaggaattttttatgttagtatcagcaaaggaaatgcttcagaaagcgaaagcaggtcattatgcagtaggacagttcaacatcaacaaccttgagtggacaaagtctattctgctgacagctcaggagatggattcaccggttattctcggtgtgtcagaaggtgcaggcaagtacatgtgtggatttaagactgtatctgctatggtgaaggcaatgatcgaagaactgaatattacagttccggtagctcttcatcttgaccatggcacttatgaaggctgctataaatgtatcgaagccggtttttcatctatcatgtttgatggttcaagctacccaatcgatgagaatgttgccaagacaaaggaattagtcaagatttgtgctgaaaagggtatgtctctggaagcagaagttggttccatcggcggcgaagaagacggtgttgttggtatgggcgaatgcgcagaccctgatgagtgcaaggcgattgcagatcttggtgtggacatgctggctgcaggtatcggcaatatccatggcaagtatccggctaactggcctggactcagctttgagacactggcagctgtacaggagaagacaggtgagatgcctctcgttcttcatggcggtacaggtattcctgatgatatgatcaagaaagccatcaatcttggcgtagcaaagatcaatgttaacacagagtgtcagctttcatttgctgctgctacaagaaaatatatcgaagaaggcaaggaccttcagggcaagggttacgatcctcgtaagctgcttgcgccgggtgctgaagcaatcaaagcaactgtcagagagaagattgaattattcggttctgcaggcaaggcatctgaataaaacaaataataaaggcggtttagaagcatcgcaatagagaaatcccaatcgattattcggtacatgtgtgtccggatgatcgattgggatttttagcttttcaggataatttgaatgccgcttacatatgatggatatgtatagagcgggaagtgacatttgaaatgagacgtaagacaggtcttctgttttttatttacgcgagcaacgagccaaagtccgtgcttgcacgagacttaggcgaccgccgcgataacttgagaaactcgtggagcgtgttcctcatagttgtattgacagcaacagtgatcataacatgtgcgggctgtttgggcggacagcaaaaatacaatggtcattcagttttaggcggattttcaaaagtgtctcaaaaagcattttcaaaagttctttttcatccggatttacagcaaaaaccaatgatcgccctgacttttgatgacggaccaaaagccggagtgacagattggcttctggatgaattggagaaacgaaatgtgaaagtgacattttttcttatcggcagtcaggcagatcttccggaaaacagggagactatccggcggatggcagaagacggacatcagatcgggtgtcatacctatcaccatgtgcagatgacgacattgtctgaaaatcagcagaaacaggaaatcctgcagtggtatcaggctgtttcgagcattatcggagatttcagttatgcagtccgtccgccctatggctgtgtcaataatgctgtctgcagaagtctgaatgtgccggtgatcctgtggtcggtggataccgaggactggacgggaaaaagtgccggtgagatcgcagattatgtgatttccgaagcaaaggacggcgacattatcctgctgcatgatatctttgaagaaagtgttcagggggcggtgatggcgcttgacgatttaatgcgcagaggctatacttttgttacagtgaatgatttgctggctgacaggggcattgccattcagagcggaaaggtctatcgtcaggcggcacaaggaggaaaatgatgaagattggttcacatgtgggaatgagcggcaaggagatgtttcttggttctgtaaaggaggcattgtcttacggggcggatacattgatggtttataccggtgcaccgcagaatacaaggcgcaaagcgatagaggaactccgggtggaggagggctggaatctgatgaaagagaagggaatggatgagattgtcatccatgcaccgtatattattaatctggccaatacagtgaagctggagacctatgaactggcggtagagtttcttgccaaagagattgagcggacggctgccatggggagcaaggtactgatcctgcatcccggggctcatgtgggggccggtgaggaagcaggcatcaggcggatcattgaaggactgaataccgtgctgacggccgatacgccggtgaatattgcgttggagaccatggcgggaaagggcagtgagattggacggaattttcaagaactggcagccatttatgaaggtgttcgatacaatgataagttaagagtatgtttcgatacctgtcatgttcatgatgctggctatgatattgtgcatgatttttcaggtgtgatgtcgcagtttgacaaggtgatcgggcaggatcagattgcggttttccatgtcaatgacagcaagaatccatgcggcgcccataaggatcgtcatgagaattttggttttggagagattggttttgaggcactgatgcaggtagtgaactgtccggattttgagcagataccgaagatactggagacaccgtatattccggatgctgagaacaagaagaaaagttacgcaccgtataagtttgaaatcgagatgattcgaaagggactctttgatgcacagctcaaagagaaaatccttcaggcagcgaagtaggacggcaaatgttagatgcatcagatgagggagagaattttatggagagattatcgatgagaattcctgagaatgccgcagtaattttaaagggattatctgaggcgggatatgaagtctatgtggtaggaggctgcgtaagggacagtctgcttggtcgtgaaccgaaagattgggatattaccacatccgcaagaccggaacaggtaaaggccgtatttgcacataccattgatacaggaattgagcatggtacagtgacagtgatgataggcaaagaaggttatgaagttacgacgtaccgtattgacggagagtatgaggacagccgtcatccgaaagaagtccagtttaccagtcagcttttagaggatttaaagcgtcgcgattttacgattaatgccatggcgtacaatccggatagaggaattgtggatgcctttgatggtatcggcgatttggaacgaaagatcatccgttgtgtcggtgtgcctcaggaacgctttgatgaggatgcattgcgtatcatgcgtgcagtgcgcttctctgcacagcttggttttgaaattgatggaccgacaaaagaagcgattacagagaaggtacagcagcttgagaatatcagcgcggagcgcatacagatggaactggtgaagattcttgtgtcggaccatcccgaatacatgcgcctggcctgtgatcttggcattacagcggttgttctgccggaatatgacagaatccggggtgtcagccagcatacgccgaaccatatctatgatgtggaagaacatacccttcgggcgatgatgaatattgtgccggacaaggttctgcgtttgaccatgctgatgcatgattttggcaagccggatgtgaaaaaggtggttgaaggaggtcgtgagattttttataagcatccggaggttagtgccgcctatgcagagaaaatcatgcgcagacttaaattcgacaacgatacccggacaaaagttgtacgacttgtcaagtggcatggcttgaaatacgatgcttccgaagtcagtgtcagaagggcactaaacagagtcggacaggatatctttgaggatttcatcaaagtccagcatgcagatattgaggcaaagaatccggcagttattccgggcaaactggctttactggcagagaaggagaaaacatatcacaaagtgatcgcggaaggacagtgctttaccgtgcgtcaattagccatcggcggattggacctgatcagggccggcatcgaaccgggaccgttgcttggagcagtactggacaaactgacagaggctgtcatcgatgaccagaggatgaacaacaaagaaaaactgttggaattggccgaaaagcttaaagacgatccggccgtatttactccaaaagaggatttctttatgtaaaaatgcgcgcggttcagaggtattgagttgcgaagcgtctgacataaaaaaactgtcggatttcgaaaaatccgacagtttttttattcggctttgctgaatttacctttgactttctgccagaaagtcttcttcggtggtgttaccagtgcagggcctcttaagctcttcacactgagaatgtagataccgccgaccatggctctgatctcctgtttcacaggaatcatatcaaaaaccttctcatcacacatgaatgtcatgatacgcggaccgaccttagctttaacaatcgggaccttggaacggcgcatcatcttcggtacgttgtcgatgacaaccttcggaagattggcctcactgatcttcatgcgctttttatcaataaccagtaatgtcattggctgggcagcgtcctgaagctgctgctgggcatctgctgatttcttctgctgcttgtttccccatacaccaacaattacaagtgcgacaatcagaatggcaagaataaccagagtgacgatccatgcggtgccaagggctgcaataggtgctattgtcacgttacttcctcctttaatacatttcaaatcaatcgaatttaagtgtagcattttttcgccaaaaaagaaatagttttttgagaaaaaaataagttattgtcaggattcgacattggcaaggctgttttctttcagcataccgccgatgatgccctgaacctgactgccgatatggcggcgttcctccttcggcatggcattgagatcgatcgggtcaccgaattcaatgataacagtggaagccttgataaaaggaatatggttctcaaaaacattttccgtattggtaatggctatcgggatgatcagacagccggatttctcggcaatcttgaagctgccttccttaaattccagcatgtcatcccccggggtacgtgtaccttccgggaaaatgcagacggaacagccgcctttgacggtggcaatacagttgaggatcgtctttaacccttctttgatattctcacggtcaaggaactgacagttcatatagcgcatccagcgtcggataaaaggaatccgttccagctctttcttggcaacaaaaccggtggtattgttggtcagtgggtacaatgttacgatatcgaaatagcttcgatgattggaaacatagaggactgcctgatcctttgggactttttcctggcctttaacaatcagatgaataccggagagccagataatgatcttcagtgccgttgtgacaatgacaaaagaactgcgttctttcttatggatgtcgaaatgtccgatgatggcttcaatcaggtacagcgggatgctgataatgaagaagcagagcaggaacaaaaggacaaggattgtacgaatcatgcgtggacctccatacgtgcgcggtcacggccgtaaacttcgctgatggtcttcagcgcttctgccagttccggtgagagtctgtctgatgtgtagcgccatgcccagttgcctgcagcagcacccggtgtattcatacggcagtcacttccgaaaccgaagagatcctgaagtgggaaaatcgcgtagcgggcagtggagccaagggctgtacggatgaaatcccagtggatgttgctgccgtcacagttcatatagcggcggaccttgtcacggtatttctcatccagttcaagataccagccaaccgttgtatcattgtcatgggtacctgtgtagcagatgcagttttcagggtagagataaggcagaaaatcgctttctgcggtgtcattgaaggcaaactgaagcaccttcatacccgggaaatggaaggtatcacggagcttctcaacctgcggggtgatcacaccgagatcttctgcaaaaatcggcaggtctttgccgagttccttctcgattgcgcggaaaagggaagctcccgggcccttgatccatttgccgttgatagctgtttcgtcaccgtacggtacggaccagtaagcttcaaaaccgcggaaatgatcaatacgcagatagtccacaagctgcagctgctgacggatacgggagatccaccatgcatatccggttttcttgtgttctgtccaattgtagagtggattgccccacagctgaccggtttttgaaaaataatccggcggtacaccggcaacggctgtcgggaagcctttgctgtcaagcttgaacagagactggttcgcccagacatcggcactgtccggtgaaacaaagattggaatatcaccaatgacggagatccccttcttgttggcataaagtttcagttcatgccactgtttgaagaaaataaactgaataaactgatagtaagtgatgctgtcggccagttcggtcagtgtggccttccgggtcctggtatccagaacctgatactgaggcgaccattcatgccaggaacggccctgatgcagatctttgagagacataaacagagcatagtcttccagccaatccttctcggttcggcagaagtggttgaaagctttatgcagggccttgtcctccgatgcagtaaaatgtgcacaggctttgcggagcagagcagtcttataagtgatcacattgccgtattcaacagaataatcgttgaaatccggtacatcggccaggtcatccttctcaagaagaccgtccttcagcagcagatccgggctgatgagcagcggctgaccggcaaaagctgaaaaagcctgatagggtgaatcgccgaaacctgtcggaccaaggggcagacactgccagagggtctgtccggcgtcatataaaaagtcgataaaagcataggcaccatcaccgagatcaccgattccataagggctcgggaaagaagtcgggtgaacaaggataccgcagtagcgtggacgcggtgttttttttatttcctgaacattcattctatattacctccaaattcaaattcctgcacctattatacacgataaacgaataaatgcatagtctataatcagaagcctatcagcagggggaaaaacagatggcatacaactatcaacgaaattgtccgccatgcggcgggcgaccgccgtacagggatccgtggggaccgccaccgccgggggctggccgaccgccttaccagggaccatggggaccgccaccgccgggggctggccgaccgccttatcagagaccatggggaccgccgccaccgggggctggccgaccgcctcatcagggtccatggggaccgccgccggggcctggccgaccgccttacaggggatcatggggaactgcgggaaaaaataacagacttcagtctcagtcatgtgcgcaggaggaagaacaggaagcggatgatctgtacatgactgatatgccggagccggggcagatggaagaagactggctgtatatgcaacagctttacccgaatacggcccgcaaactggtgtattatattgaggatgcggccgatcggctggaatatgagaacagcatgatgtttgacaattacccggaccggatcgcggtggagcaggttgtcaaagagattattgcggtcattcaggaaaatgacccggcgcttataacaatgcctgaagatacggctgtatcagaaagaaaaggggatcagacctgggatagctgcatggaagaaatgatacagatcatgctgcttggtgagatgcatcacaggagatggcgttatcagcagctgaatcgcagaaattattgaaaaatacctgtgaatcgttataaaaatggtttaccgcaatttacagacagaaaatgttatgttaaactatagaattgaataataatcattgcgccggcgctctgaggaactccggcgtttcttataaaatatagataaggtgtttagatgaatcagatagaagaattattgaagcgtgtgctgacatcgcttctggtagatatggtcattagcggtgcaagaggcggcggtgactttataaagataaaggtacggcctgttatgatccgggatagtctgtattttcaggtatccagatatacggacaagcaggtttttcatgagaatatgacggcggaggatgctttggagacattgtctggatggatactgcatgatttccgacaggcgcagatccggatgcaggatgaaatggtgacggtgcttgtcagcaagaagggcaaggcaacagtaaagagcaaaaaagtagcctgcattgagacacagaatctggagcataatcgcaagaagcgatatatcatcgaagaaggaacggcagtgccttttatgattgatctgggcgttatgacagaaagcgggaagattatccgcacacgttatgacaagtatcgacagatcaatcgcttcctggagtttattgaagatattctgccggaactgccaaccgacagaaccgtgcatatcattgatttcggatgcggcaagtcttacctgacatttgccatgtattattacctgaaggtgctgaagcattatgacatccggatcacgggactggatctgaagcagaaggttatcgaagactgtcaggcattggccgaccggtatggttatgatgggcttcagtttttatgcggagatattgcggattataacggcacagatgaagtggatatggttgtgacgcttcatgcctgtgatactgcaaccgattatgccttatataaggctgttaaatggcatgcatcggtgattttatccgtgccgtgctgtcagcacgaactgaaccgaaagatgcagtgtgaaactttgtccggggcttttcagtacgggctcatcaaagagcggacagctgccctgatgacagatgccatgcgtggacagctgttggaaatgaaaggctataagacgcagcttcttgaatttatcgatatggaacatacaccgaagaacattctgatccgtggggtgaagtccaagggacttttgccgaaggcggccagaaagcagcagatggagaattatcagaagtgcagagatttctttggtgcagagctgaccctggagaaactttttaaggagatggaaggggagatggcgtatgagcagaactaagaagatactattgacgctcctggcctatcttaccgcttttattgcagcagtctgtgtcagcagctttgtgcttaatcaggggaaggtcagcggtgagcagcagcgttcaagcgcggatctgccgcttttgtatgtgcgtaccggcggtgaactcatgaatgaaatgcatgggtatacagagccggtagacggcggttactacagagatacgctaacacctgtaggtgagagcaagaccatcaatctgagtatggatacctatggacacaacatttcctctgtcagttttgagctgtacaatgatcagtatacagatctgatcgaaagcggagactgtaccgacatggaaaaggtcaatgctatggttcaaatgcagctccaattcaaaaacacactgtattccaacagggagtattgtctgcatctgatgctgaaaaacgatcaggatcaggtttatcattattatacaagagtccgttacggatcggatctgaaggtagctgagaaactcaagtttgtcctggatttcaatgaaacgactttcaataaggacagtgcagatgctttgagcagttatcttgaatcaacatcctcttcctcgagttcagacaagagtctggtgacgctgtattcatcgtcggatacggtgacatggggaagtatggcgccataccgaacaagcgagatcgctattcgtctgaaggagattaatacggagacggcggcttttaccttgtcctatacgatagaatcttcagccggagatattaatacattttataatgtcaatgagtattacaggctgcgatggacagattcaaaggtctatcttctggattttgaacggcggatggcagagaatatcggactggcagatataactgtttcttcaggagcactcaggcttggtatcggagacgcttcagatatcgactatgcctcctatggaacagaccagcagcagtatacctgggtaacaggcgatcagcagctgtggctttatgataataccaatcgtattatgaccaaggtttatacggaggaggatgacaatcacaattgcggacgacaggatgaagccggcataaaggttgttcatgcggatcctgaaactggagatttgtattttattgtgtatggttatatgcattccggcaattacgaaggccgggaaggcgtgatggtttatcatttcagccatgaagatgttcttctggaagatcttgtttttattccttttaataaaggttttgagcagatgcggtcaggcctggaggaactggcttatatgaatgatgacggcacactgtatcttttgctggaagataccgtttatgccatcgatgtcaatatgggcaaaatggatgtggcctacaaagacctcaacagcagcaattgtacagcatcgggagacggcatttttgttatgtgtgacggcggtgatgaaaatgccggagaacggctgaagatcgttgatctgaattccggaaaggaaagaaccattgaaggcggcgactggcggattgttcctcttggctatgcgggaaaggatctgatctatggtctgatcgatccacagatgttgacagaggattcctccggtgtcattcgcacaccgatcagcgaagtgcacattatggatgagaattataatgaggtcaagacgtatcagaagagcggtgactatgtgatgcggctgaccatcagtgacggcaatatatccatgaagctggccaaggctgtaaagaacggcaattatacggattatcaggatgctggtgaagattatatcatccgtaatatcgaaaatgatgaccagaaaatttatgtggataaacaaaaggacagtatcagaggacagcagaactggctgcatctgaatacatccgacagttttgtgccgatttcacagagtgcccgttacctggatccgggttatgatatttcaaggaaatacgaagatacggatcaggtggaaatgcagtattatgtttatacaaagggacgcctggatgcggcatttgcgacgatccaggaggctgtggattacggtacgacctacgccggcacgattatgaccagccacaagcaggtgatctggcagaaagccggaagagcttatatctggggtctgaatattgacagtattgacaagaccagcagtacacagagcatgaacagcattttgatcaagacgattgcagattacgaaggttgggaattaaatggcacgatcgatgatgcagagccgttatttgcggcgatgacagcggtactcccggcggagacgattgatctgagcggcctgaagctggatgatgtgcttcattttgtttatcgcgaccgtgttgtggctgtcaaactttcaaacaacaattacggtctgatcacggcttatgataatgattatgtctggattgcggatcctgcaaagggagaagtatattccatgacacagacagcagcagaaaagctttttgagcagaatggaaaagtctactatagctatatggattaactttaaaaagtcatatggacagacagagtgccctgtgcagtcgctgtaaggagatggagcagggagaataaaggaggagatatcaaatgggtgagattaagacaattggcgttttgaccagcggcggagatgcaccggggatgaatgcggctattcgtgcgatcgtgcgtacagctatcgccagcggcctgaatgtcaaaggtatcatgcgcggttatgccggccttttgaatgaagagatcattgatatggacaagcagagcgtttcagaaattatgcgacgcggcggtacaattctgtatactgccagatgcaaagaatttatgactgaggaaggacagcagaaagcggcagagatccttaagaagcatggcattgacggactgatcgtcatcggcggtgatggctccttcagaggagcacagaagctgtcagctctgggcatcaataccattggtatccccggaaccatcgatctggatattgcatgtacggattataccatcggttttgatacggcggtcaatacggctgtggaagccattgacaagatcaaagatacatctatgtcccatgagcgatgcagcatcattgaagttatgggcagaaatgcaggttatattgccctttggtgcgaaattgccaacggtgcggacggcattctgatacctgaaaaggaacagttcgatgagcaggatctgatcgagacgatcctctcaaaccgtttgaaaggcaagaaacatcatgttgtcatcaatgcggaaggtatcggggattcgaatcgactggccaaacgtatagaaacggccacaggtattgagacaagagccacgattcttggtcatattcagagaggcggctcgccgacagctaaagacagggtatatgcatccacaatgggtgcttatgccgttgacctgttgtccggcggtgcgaccaacagagtcattgcctataaagccggtcagttcacggactttgacattgacgaggcattggcaatgaaaaagaccatcgacgagtatcagttcctgatcagccgtctgatggtcatgtactaaatatatttaagctctttggggttcagataaaacctcaaagagctctttttatatcgatggataaggaatgagatgaataatgctgttgatgagttcttcacggtccatgccccatgcaaggcagctgtccaggttctcaagaagctgatgactgttctgaagtgcctgctcaaagatctcttcaaaggagagataggaagcttccgggcagccgggataggtgtaccacggctttttgtcagtgttcatataatcatgttcatcagacagataatcctgatagaccttcttcttctgagcggggaggattggcagagtgccttcaatccggtatctcagcaaatgataaaaacggttgttcgggcgcaaatgaatgttctgacgctgcatattgcggacgcctgtactgatttcattcgcggcgatccggtacttgtaagtggtctggatcgtctgacgcatcagataggcaatggctgacaggtctttgcggctgacaaaggtcagtgcttcaaaattcagctgggaaggctccatatggcagcgactccgaagcagcactgtgtcaatggttgtctcaaccttccgacggtgacatgtcatgcgggatgaactgcacttggccggaagatcctgccagaccctgaaaagaatatagggtgaagcagactgatcaatggcaaaaaagcagagatagcctgccatataggcgatgcagacatcgcgctcctgatcggccatgccacttaatgtatccagcatattattaaaaaacgcagcgtattcctggttgcgcagcgtcagggaagctgtacgataggacagtccacgcttggataaagtatgaggattaaaggagagcagattgttcccttgaagacccagaagaaaagcatggttattctttttaatgacttcatggatatagttgtcggaaagcatatcacaggattccattccaaacagataatatgttaaaaatccagccatagggtttcgtcctttctaataagcgttgtacatacggatatcagtatatacaataggtatcatacatgattgagactggatgttcaatgaattgagtgtaaacttttctaaaaggtttataaacttgaaaaataataaaaatagaacacttgtttctttttgctatatgtggtaagattttgctatatggaggttgtgacaggttatcatggatttatttgattatatgagagaagacaaaatggagaaagagtcgcccctggcttcaaggcttcgtccgagaacgctggatgagattgtaggacagcagcatattctcggacgggacaagatgctgtatcgggcgatcaaggctgataagctcagctcgattattttatatgggccgccgggaacaggcaagacaacgatagcgaaggtgatcgccaacactaccagcgcggcattcacacagatcaatgcgactgtagccggcaagaaggatatggagcaggttgttcaggaagcgaaggaccgtatgggaatgtacggcaaacggaccatcctttttgttgatgagatccaccgttttaataagggtcagcaggattatctgctgccttttgtggaggacggcacgttgatcctgatcggcgcaacaacggagaatccgtatttcgaggtgaatggcgctttgatatccagatcggttatttttgaactgaaaccgctgtcagcggaggatatcggggtgctgatcaggcgtgcggtttatgacacagagcgcggtatgggcagttatggagctgagatctcagatgatgcggttgattttctggcggatatgtccggcggtgatgcacgtatggcattgaatgcggtggaattgggtgttttgacaacagaaccgtcagcggatgggaagatccacattacggttgatgtggcatcagaatgtattcagcgccgtgtgatgcgttatgacaagaacggagacaatcattacgatacgatctcagcttttattaagagcatgcggggatcggacccggatgccgctatttattaccttgcaagaatgctgtatgcgggggaggagccggcttttattgccagaagaattatgatctgtgcatcagaggatgtgggcaatgcagatcctcaggcactgcaggtggctgttgccgcatcccaggcggttgaaagactgggaatgcctgaagcccggatcacattggcccaggcagcagcctatgtggcctgtgcaccgaagagcaacgcagcgatcatggcgatcgatgaggcgatggccctggtgcgttcaacccaggcagctccggtaccgccttatctgcaggatgcccattacggcggggcagcgaagcttggacatggcattggctataagtatgcccacgactatccgaatcattatgtcagacagcagtaccttccggatgcttttaaggatcagaagttctatcacatgggagatctgggctatgagaaagagatgaaggaacatatgcggcgtatcagaggagatgaatcggatgaagagtaagcgattgatcgttatttcactggatgccttgggcagtacggactttgagatgttttcgcagctgccgaactttaagaagtttattgaccatgcggctttttgcaggcaagtccgttcggtgtacccgtcactgacctatccggcccatacgacgatcgtgaccggcaggccgccggcagaacacggaattgtgaacaatattctgattcagccggaacgctcatcgccggattggttctggcagcggaagtatattcaggggacgacattgtatgatgaggcattgaagaagggcatgcaggtggcggccattttatggccggtgacggcgaagtctgatattacatggaatcttccggaaatttttgccaaccacaggtggtcgaatcagatcatgacatcggcggccaatggcacattggggtatcagttgaccctgaaccggaagttcggcagcctcagagacggtattcgacagccggccctggacaattttgtacaggcttccatgaattatacgatcaggacttacagaccggatatgatgtttgtacatctgacagatctggatacacagcggcatcattttggtgtgcattcgaaggaagcccatgcggcgatagagcgacatgaccggagagtcggagaactgatgcatttgctgcacaggtgcggaatgtccgtgaagcgggatacaacggtagtgcttctcggtgatcacagtcagctggatgttcagaatattatattgatcaaccgatttttgcgtgagcagggatatatcagggtacagcatgggaggattacggactggaaggcttactgtcagaattgtgatggttcagcttatatttatatcagaaagaacggactggagaagtctgagcagattcggatcaagaatgaaatctatgattggctgtgtgccatgaagaatgatccggataatggcattgcggccatttattcatcgaagaaggcgaaggagctgggggcagacccggaatgtacttttatgttggaagcacggcgcggattttattttcagaatgagctggatatgggagagattcctgaggtgcagcgggcaacccacggttttcacccgggaaggaaagactatcagactgttttcatggctgttggaccggatattatgccgggagtggagattgaagagatgtctctgatggatgagggcccgaccatggccgagatcatgggactggagcttccgggggcaaagggaaaggttctgcgggagattttccggtagtttgatccggcggcagacagaaggaccgacggagcggccaatgtatttttcaaattagtagttgacatttcagaaatatcattgtatcattccttaatgaaacttggttccattaaggaaagagagtgtaatgatatgataaagaatagaataagattactgccggtgcttttgcttgctgtgtgggtgctggcaggctgcgggcatcaggtggcatccgctgataaagcgtctgacggcagactgcaggtggtgacaaccttgtttcctcagtatgattttgccagacagatcggcggcgatcatgcggatgtgagtctggttctgctgccgggaatggagagtcatatgtatgacccgacaccgggagatatgatccgaatttctgaggctgatatgtttatctataccggcgccgagatggagccctgggctcaggagctggcagacagtgtcgatatgtcgaaagtaaaggttgtggatgcttcttccggcgtttctatgatgaaggaagaagatgaggaacatgaacatgcggaggcggaggaagattcagcccatgcggaggaagacagtcatgaccacagcagccatcaccatgagcatacgtatgatccgcatatctggctggatatgcagaatgccatacagatggtgaagaatatcgaggatgccttttgtgaggcagatccggccaatgccgagacgtataaggccaatgcagaagcttacattgagaaactggaggctttggacagtgaactgaagtcaatcacagcaggcggtaatcgccgggatgttgttttcggcggacgttttgcctatggttatttcattcacggttatggcttggagtatgagagcgtttatgacagctgttcgacggatacggagccgagcatggcacagatggcgaatgtgatcaactatatgaaagaacaccatgtgaagtatattttatatgaggagctttcaacgccgaatgtagcccgagctattgcagatgcaacaggtgcgcagatgctgatgttttccacctgtcataatgtaacgaaggatgaattcgaatccggcgtgacctttattgatcttatacagcagaatgccgatacgctgaagaaggcattggagtaggaggaagaaatgtcaattctggaagtcagagatgtgtcgatcatttacagcgatgataagcgtgtcgctgtagaacatgcatcttttaagatagaggcaggcgagtatgcctgcatcataggcagcaacggttcaggcaagagcacccttgtcaaggggattgtgggactggtgcctgttacatccggtgaggtcattcatgcgctgtcaccggagcagtacgcttatttatcacagattacggagatagaaagagattttccggcaaccgtcagagaagttgttttgacgggcatgcagcgttccggaagacgttttcctttttatacgcgagaagacaggaagaaagctgcagatgccatggagacattggatattacagatctggcagattacaggatcggcaacctttcaggtggtcagaagcagcgtgtgcttctggcaagagctctttgcagagaaccgaagcttttgatcctggatgaaccatgtgcaggtcttgatccggcgatcacagcggagttttacagtttgatcgaccatatcaacaagaagcagggtgtgaccattcttatggtttcccatgatctggatcaggtggaacagtatgccagccatattattatgatgaatcagaccgtggaattcgacggcgatcatgaagcatggtgtagaaagtgtgcacaagaaggaggacattatcatgacacagttaattgaggccctgtcttatccgtttgtacagagagctattgcagctggtgtgatgatttctctttgtgcggcactgctgggggttattcttgtattgaagcagtattcccttattggccatggactcggagatgtcggttttgcatccacatccctggccgtagcgctcggactgccggttatggcagtttcgattccaattgttgtgattgcagcctgcctgatcatgttctggtcccagcggtctaaaaccggcggggatacagcgattggcatggtagccacaggtgcattatccattggtgtgatcatcactgccatgagcagtggattcaatgtagatgtcaacggttatatgttcggcagtattctggctatgagcagagaggatgtgatcttcagcgttgtgctgtcgattgtcattcttgtgctgtttgtcgtattttataatcggttgttcctgatcacattcgatgagaatttcgcaaaggccagcggtatcagcgtcgggttttatcagtttttgattgcgctgctgacagcattgaccgttgttatgggtatgcggatgatgggaagtcttctgatctccagtttgatcatttttcctgcggtgattgcgcgcaagctggttgtcagcttcaaggcagtggcagtattatccgtttttctgtctgtgatttgcttcctggcagggctgatcctgtcatttgagatgaatcttccaacgggtgccagcattgttatcatcaatctgatcgtgctgattgcagtgacgattttgaataaattacgcggaagatagatccgtttaaccattagttataaaaaagtaagatttttatactggtattttatggattgacctgttaagatataacagacaggagttgtctcctgctcattatacgcttaaaaacatctaatcaggaggttgggaagattgaagattctgtcttttgcggttccttgttacaactcggaagcttatatgcgcaagtgtattgattcactgctgccgggcggcgaggacgtggagattattattgtagatgatggttccagcgatggcacagctgccattgcggatgaatatgaagcaaagtatccggggatctgccgcgcgatccatcaggagaatgcaggtcatggtggtgcagtgaatacaggtattaccaatgccagaggcatgtatttcaaggttgtggattcagacgactggttggatacagacagctacaagattgtgctgaatagattgaaacagttcagagaagatcgcaagcgtgtggatatgtttatctgcaattatgtctatgaacatgtggaggatggtacatctcatacaatcggctatcataaggtgctcccggaagagaagatattcggatgggatgaggcgcgccatttcagaatggatcagaatctgctgatgcactctgtgatctacagaaccaaagtgctgagagagagcgggctgaaactgccgaagcatacattctatgtggacaatctgtttgtctatataccgctgccgtatgtgaagacgttgtattatttagatgtggatctttacagatattttattggacgtaatgaccagtctgtcaacgaacgcgtgatgatcagccgtattgatcagcagatttatgtgaacaagctgatgatcgatgcctactgcctgccgcaggatgtatccaataagcatctggcgcgttatatgttgagctatctggccatgatctgctgcgtgacatctattatgcttctgatctcaggaacacctgagaatcttgagaagcgtcgtgaactgtggcaatacttcaagaagaagtatccgagcatgtactggagagttcgccttggcggccgtggtattgtcagcaatccaccgggcaagatttcctatggaattgttgtgcgatgctacagaatggctcagaagatttacaagtttaattaagagaaatgcccgatgcttcgggaatatgagttgggggaatgacaatgcgttgtccgaattgtggccagcgcctcgcagatgaggcgggaagatgtcctgtctgtgggacagtaattgatgaagagacaagaaggaaagccatgaatgaagatgattttgcttcatcttcatttgaaggtacatgtcagtcaatgggagaacaggcatcagccgcacagagcgggcgtactgatcagatggctccggatgagaagcgttatccggcgagaccgatgaagtggtacaagtttctgatctatttttccttggttctgacaggctttgccaatatatggacaggtgtagaggctgttctggggatgcagtacgagacgaagagtcaggcagcacaggtttatgctgtctatccggggcttcatgtgttggatattatttacggtgtgctgttgattctgttgggggtctatgcgctgattgtccgccagtatctggccggatttaaggcgaagggaccgaagatgctgctgatcatgtatattgtttcactggtgattgaggttgcttacattgcagcaagctctctgatcagcggggtgaatcttctgacagcatccgaatcaggaacgatgctgatttcaagcatgatcgtgtcattatttatgatcggggccaataaggtttatttcgataaacgagcacacctgttcaataaatagtacatttttgattcagaatacaaagagaacatggggaatggcgccggatggtgcggttccctttctttttgttcatgagctgtaaaaaccagtggtaatttatcaaaaatacgttataataaatagagatgccaacgggtagagaaaggggaaacatatggcaagttcagatataggaattgacttgggtacagccagtgtccttgtctatgtgagaggcaagggagtcgtactgaaggaaccttcagttgtggcttatgataaagatacaaatgaaataaaggccatcggtgaggaagcacgtcagatgatgggacgaactccagggaatattgaagctgtacgtccgctgcgtcagggtgtgatctcagattatactattacagagaagatgttgcgctactttattcagaaggctatgggcagaaagacattgaagcgtccgcgagtctgtgtaggtgtaccgagcggtgcaacagaagttgagaagaatgcggtctggcaggcagcgctggaggcaggtgccagagacgtgatgattattgaagagccgattgcagcggcccttggagcaggtattgatatttcgcgtccatgcggcaacatgatcattgatataggcggcggtacgacggatatcgctgtgatatcgctgggagatacagttgtcagccgttcactgaagcttggcggtgatgatttcgacgaagcagtgatccgatatctcagaaagcagcacaatctgctggtgggtgatcggacagcggaagatgtgaagattcgcattggcggcgtgtatgagcgtgtcagtccgcttttgatgcaggtgaagggccgtgacctgatcaccggtatgccgaagacagtggaagtcagcagcacagagatgctagaagctttcaaggagaatattatccagattctggaagtggtccatcaggtactggaagatacaccaccggaactggctgcagacattgccacaagaggtatcttgctgacaggcggcggcagtatgctctttggtatggatgacctgattggagagacaacaggcatacagacaacagcagtggatgatccgatttctgcagtggccattggaacaggacgttatacagaatttattgaaggcaaacagacgagagcctgatgacagacgagaatggatggcgaatcagatgccgcagcagactgcggtatccggttcgctattcttggttaagttagggtattaaccatcaatacatggtagtaggagtaatggaatggaaagcatacagggacttgtggagcatattgtctatcacaatgacaccaatggatatacagttttttccctgatgtgccagggggaagagattgtctgtgtgggaaatgtcacttcgctggatgaaggagaatatctcaaggcagagggtgaatatacggaacatcaggtatatggaagacagttcaaggtgacttccatgagcgtggaagtgccggaggatgaatattccattgaaagatatctcggttccggggccatcaggggtgtgggaccgtcactggcagcccgcattgtcaagaaattcaagaaggattctttcaggatcattgaagaagaaccggagcggttggctgagatcaagggcatcagtgaacgcaaagccagggagatctatcagcagtttcatgagaagcaggatatgcgtcaggccatgatgtttctggcgaaatacgggattacaacaaccttatccctgagaatttacaaacagtacggcgaggagatgtaccggatcattcaggagaatccgtaccggctggccgatgatatgaacggcatcggtttcaaattggcggatgagatcgccaaaaaggccgggattggttcccattcagattttcgaatccgcagcggcattatctatatgctgcagcagggaactctttccgggcatatttacataccggcggcattgctggtggagaagacggcccagatgctgggggtggaagaagaagctgtggaccatctgcttcagagcctgcagatggacagcaagattgttgtgaagaaaatagacgatgtgtcggtggtgtatggagcctcactttaccgtctggagctggagaccgcgggacttctgaagaatcttggtgtcgattacagcgtggatgagaaggaagtaggaaaggttctggaccgtattgagaaaagggaaggcattgatctggatgaccaccagcgtgaagcggtgtattctgctgcaggcaatggggtgcttgtcatcaccggcggtcccggtaccggtaaaaccacgacgattaatgccattatcaaatacctggaatatgaagggttggagatgcgtctggcggcgccgacgggaagagcggccaaacgtatgtcagaagccacaggacgggaggcccagaccattcaccggatgctggaattatcaggcggaccggatgacgaccgcctgcgaacacagtttgagcgcaatcaggacaatcccctggaaacggatgtggtcattattgatgagatgtccatggtggatatctatctgatgaatgcccttttgaaggccatagccgtgggcacaaggctgatccttgtgggggatgtgaaccagctgccgagtgtaggaccgggcaatgtgctgaaggatatcattgattctgaatgttttcaggtggtacgtctgacgaagattttcagacaggcactggaaagcgatatcatcaagaatgcccatctgatcaatgagggacagcagattgaacttggcaacaaaagccaggactttttctgcctgaaacgatatgatgtccagcagattctgggggtcatggtgcttctgatcagagacaagcttccgaagtttgtcaatgcaaggccttacgatatccaggtgctgacgccgatgcgcaaaggagaactgggggtagagcggctgaataccgtactgcagcactatctgaacccgccgtccccggacaagaaagagcgcgaatttcatcagggtgttatccgtgaaggggacaaggttatgcagatcaggaataattatcagatcgaatgggaagtgctgggacattataatctgcctttggacaagggcgtgggcgtttttaacggcgatatgggcgttgtccgggaaatcaatcattttgcggaacagctggtggtagaatttgatgaaggacgcagggtgacctatggctttgcacagcttgacgaactggaactggcttatgccattacaatccacaaatctcagggcagtgagtatccggctgtcattatgccgctgctgtccggcccgcgcatgctgtttaacagaaatattctttatacagcagtgacccgtgccaagcagtgtgtggccattgtgggggatgagcataccgtccgtcatatgatcgagaatgaaaaacaacaaaagagatatacgtctctgaatctgcgtctcagagaaatgaatacactttcatagaatatcagggggagaatatggaacgaatgaaaatcagaaatccaaaaatcaaaaagtggcggggactgcttattttggcattgatcggagcaatcattaccgtggccatggaaatttatctgagtgatcatgcactgacaccggatcagattagcaaaaaggggcagtattgtgcggttacaagccgatggatgagtgatgcctttgcaacggaaaccatgaacggtgaagatacatatgattattttcttgtgttaagcgaggattccgacagattttttatgatcagaagctggacggatgatgaacaatgtctgaaatacattgattccctttatgagagcggtgaatatgagaaaatcgaccaggagtggaccggaggatcgcagccggtggatgacgaggtgaagaattatgcgatccagtatgtgtccgagtatctggggatgaatctgacgacagatatgtatgatgactatttctacagttactgtatggatctcaccagcatgggggatatggatacagtcatcggcggtatgctgcttatgtttgctctgctgctgatcggtctgttgggatgcctcatttcagcgataggctggcacggacgcattgcagcccttaaaagacaggatttctttccgaagtttgagcagaattggatgcagagcggcgagaagatggacacaaaacatcgtcaggtggtagttgtcaaagactttttgctggtgccttcttataaggatatcgttattccgctggatcaggctgtctggtgctatgtgctgcctctggcaaagaaaaactatggcctgtatatcatgggaacggacggcaaagcggttctggtgtgccgggtgaaggaaaagggttccgtctacgtccgggaataccttgagcagattcatctgtcggcaccgtggatggccattggttattcggccgagaaccgtcaggcattcggcgcctacgaaaaaagtgaaacgattgcaaaaataattgcaaaaaaagataaaatgatgtcacagtttcccttctaaagaggttatataagtgtatgcttcacggagggacgctagtcagttatatttcaaatgaagggggagttgcaatatgtatggagagactggagaaccaaaggacggcaatacgaagattgcaggtcagggacattgccggacagagaatatggaatgcggcaaggaacttgatatgcagaaagaaacagataaacagattctgtcaacgctgaatcaggacaattttcagaattcctctggtggaaagaaagcagcggaagatgacgagatgggactgttttcacaggggtttatggaccgcatgcgtgagatggtgtcggaacagtttggtgaggaagccgcagaacggtttatggtacaaaataaagatatgataaaagaagaaaaaacaacaagcgccgtaccagaatccgaaaaaagattgcctcaaacaaaaaacgcggatgttcccaccgaacaatcggtaccgcttaccgcagagcatccggatatctctgaggagacagccactaaagggccatcgaagcgttcataccgtagatgggtctggcgcgcagctgcagtacttgtggttgtactggcgggttttggtgtgcacagggcaggcagtgtcagtgccacgaagatacctgctgtgaacacggcaccggagacaacagccggcattgattattccaagatcggctcgctgaaggatattatatcaaccctggattataccagtttttcgaaggagatcaagcaggtttatgtgcctggggcgattgcggaagggtataaagaaacggaccgatcggaacagtcgaaatatatcaacatcttttatgaaaacgatggtgacggctggtataaatatcgtcaaatgacagtcgagcagaatacattcttggatacggaggagggggattgggactctctgagtatcggacagtatccgggggtgtatattgaaaaggatcatacaggaaacttgtggtggtttgattatacttatgcctatcagctgcagggcaatctttctgaagaagagatgatagcggtggcagaatctcttacggcagaaaagtagggaatagcttatgagaaaagtgattgcatttttgatgacagtaacggtctgcctgtccttgatgatcatgccggccatggcggcggaggattacccggaggtggggtttgactttgaagccttcgaggcccaggagcgaattgacggcacaccgaaggtggccagatggaagtatacatcctccacatcccagggcatcagtgtggaggataaaacagctacagcatgtatagatgtgactggatacaaaggcaccgttactcgtattgtagcctatatgtatattcagcagttaagcggcggcaactgggtgacactggattcccaccgttatgaattcaacagctggcatggtgacaaggagattacttattcgccgtgtccgcacggttatacctatcgattgaaggcatcctattatgtatactctggttcgcagtatgaatatatttctgcaaccagtgcgaacttcgtatacaattaggatagatgatctgcagcaactcccccttaaagcttacagctgcagattgtaccctgcgggggcgtccatggccggaaagcgaaggtctggcgcccctgcataaaataacttattttagatcctttctcaacctcatataaaggatagatggccccttccgggtgttataattcggaaggggccgattttttatttacgcgagcaacgagcaaaagtccgtgcttgcacgagaccttggcgttgctaagcgccagtggcgcttgtttagcaacgaccgaaacggagtgtagaggccgcgataacttgagaaactcgcggagtgtgtttctcatagtttgcaggaaacatgcatcaagagattcatgcaggatcggaggatgtcggatgttctgctgtctgtgccggtttatgtcgatgaatgatcgttgaaaaaggcgaatagaccgtgtatactgagcctatccccgaaatacatagaatagtcatcggaggaaagtgcagtggatactggaatgcaggtacatccagaaacacaataaagctgcgtataaccgttggcgtcagtcattcgcagctttattgtgtgttatattatttatagggaggatgattacctgttggatgggtgccaacagatagccattataacaggatcagtacaacagtgtgactgtcctggagaagatcgggtaggtgaatgtggttcaagcattcttaattatcttctcgcctatataatatagcaaaaggcgtgccaactttttttaatatggaaaaaggccattttttgaaaaaataagccaaaacaggtcgatttattcaaaaaaacagaaaatagtgaaaatgatatgtctattaaatagacataattggcaggcaaagaatagaaaattacgtaaaataaagcaaaagaagcgtctataaaacggacacacataaaattacaatgttcgttttatagacacttcctgagaatataaattcaaaataacataataaagataaatgtacttataaaaatacaataaagttattcgtgaatgccaagatccttcattttcttgtacagcagcgagcggtgaataccgagctgtctggccgcagcctgacgatttccgccattgtcccgcagggccttggtgatcagttggcgttccaggcaggcaatctcatagtgataatagccatcactgctctcaaggggtgaagacttccggtaggcctggatatattccggcagatgctgaggcagaatctcactgccttcacagatgatggccgcacggtcgatgacgttgcgcagctcgcggacgttgccgggccagttgtggagattcagcagatccatggcttcctgtgacatatgcagctgggactgatggtacagcccttccttctgagagagcatgctgctgcacagaaccggcaggtcttcaatacgctcccgaaggggcgggatattgatattgatgacgttcagacggtagtagagatctgaacggaaactgccgttttgcatggagttggagagattctcattggtggcggcaatgacacgggccttgaagggaaccttcttgttgctgcccaggggaacgtattccttggattccaggacacggagcagcttgacctgcatgtccataggcatggttccgagttcgtccagaaagagcgtaccctcaccggccagttcgaatttgccgatcttgccgtctttgcgggcaccggtgaaagcgccgctctcatagccgaacagttcggcttccagcaattccttcggaatggaggaacagttcaggctgacaaagggctgatgactgaccagactggcattgtggatggcctgggcgaagagctccttgccggtaccactttcgccctggatcagaacactggcatcactgcgggcaatggtctgtccgagatgcttcaggttcagcattttctgattgttggtgatgatatcgtcgaagtgatactgggcagcgtacatcttggcaatctcactccgataagccttgaagttgtcttccagcttggacatccggctgtgcaagtgggcgatttccttgatatcacggaagatgatggtaccggctgcaccgatgacttcatgattgtgaatcagagggattcgattggtgatgaccatggagccattgatctcctgaagctgcatcagctccttgacaccggtctgtgccacaacgtgaagccgcgtgttctcaatgacttccgtgacgtggcgtcccacagcggcagatgcctttatattaaagaatttctcatagtaccatttgatgatatagccgtctttatcgacgagacacataccatagtgttcggtatccagaatatcggacagcgtatcaatactgtccgtcagtttgtcgaagtattcctgatgcgtcataatgtgatccaacctcttggtaatatagataatgcgaagtgttgactgtatacggattcattatagcatagatgcgataaaaggaaaaggacagccaacgaacggctgcccttttggagaaggtatatttattatttggggtgtaataaaaatataatgtattgggggtttacgcctattatattatcacggacccgactgtaagtgttcacaaataatgcatgaaatatagaaactttgtatacaaaatgacgcgtgtcagggggcgattagacaatatgattaaaaaatatctaattcctattgatatactggggaaaatgtcatgaactggaaggaatggacggcactgctgtatccgccggagtgcccggtatgtcagaagctgctgtcggatactgaggacagaaggcgtcacattcatggtgattgctatcggaaactcagacggattgtggaacctatgtgcaaacgctgcggcaaaccgcttttgtcagcccagcaggaatactgctatgactgtcagagacggtcatcggcctgtgaagcaggacacagtctgtggatgtatgatgctgtcagttcagagagtatatttgcttataagtatgacggaaagagagtttatgtggatttttacagtcaggcagtcctgcatttttacagggactggattgaatcattgcatgtgcagcaattgatcccggttcccctcagccggagaaagcagcggcagagaggttttaatcaggcggcattgctggcggagaaaatcgccgaagggctgtcgttgcctgtgaatacccggggactcagaagaattcacagtactgcaccccagaagaaactgggcaagtatgagcggggtgagaatctcaagcatgcttttgttgcggatgcccggtatttgcagggggtcaggcgggttcttctgatcgatgatatatatactaccggcagtacggtgaattactgtgcaggggcgttgaaacaggcaggaatcgagaaagtctggtttctgacactttgtacaggcggtgttttttaaggaaaagcgaagagattgtgtacatattgcaacggtcatccaatcaaaaactgtgtcatatattcactttttaatggagaaattgttgccttttgattcacataaagcgtataatagaagacagaatacgacagtgaagaaggtggacataaatggatgccgaaatgaacagaaagttatctgctgtatctccggaagaagtagagacggatacagttaagcaggaatacggagagcggatgaagaaagagaacggatttgaaaatttcaagggcaatgatccaaagatccggcatatcagggaacttggtcagcgtattgcccggacagattttcccgtactgatcaccggtgagaccggtacaggaaaagaagttatcgccagggcaatccatatggagagcggacgcagtgaagagccttttgtggcgatcaactgtggggccatcccggcggaactgttggaatcagaattatttggttacgaaggcggttcctttaccggggctaagcgtcagggaaagatcggcaaattcgagatggcgaataagggaaccttttttctggatgagatcggagatatgccgctgcatatgcaggtgaagctcttaagagtcctgcaggagcatgagattgagcgtgtgggcggcagcggaccgattccgattgatgtgaggatcttatcggcgacaaggatgaacctgatggagatggtgcaggcaggtacattcagggaggatttgtattatcgtctggctgttgttaatatacagacggtagctttaagagcctgcccggaggatattattctacatgcgttggattatctggatgaattgaaccggcagtacaagacccatgtggatttaagcgatggtgcaaggcggtgcctcaaggcacatagctggccgggaaatgtgcgggaactgcagaatgtgatatccggtgcctatgcaacctgtgaagattcactgatcacactggataatctgccgaagattatcactgtcaatcagaaagaagagcggattatggaggatatagagcatctgccactgaaggagaagatgaatcgtttcgagaagatgctgctggaggaggcgctgcgcagcaacaagagtatgacagctgcagcgacatctctgggaattgagcgcagcctgctgtacaagaagttgaagaagtatcatttgaaagaataaaaaaatttcaataaaatattgacgaatagggtataaatgtgctatagttgtaaagctatgtaatggaagtggtcttttttttatgcctaaaattaagaccaggtaacttatcctgctttagcggagcaggagacacactcagattaaatataacggaggtggaagttgtgcgcgttaagataacattggcatgtacagaatgcaaacagcgtaattacaacatgacaaaagagaagaagactcatcctgacagaatggaaacaaagaaatattgtaagttctgtaagaaacacacattacacaaagaaacaaagtaatttaggatgactgtgaggagtgaataacatgggcaatgcaactaatgagacaactaagaaaacaaattggttggacgccattaaagctcagttcaagagaatcatctggccgacaaaggaagaagctgccagaaggtccgctgttgtccttgctgtttccgtactgcttggagtaattattgctgtattagacagagttttacttctgttgacagacgtaattatttcattataacagaagggtgagaatatggcagacaggaatgaatatttggaagacccgatgtggtatgtagttcatacctattccggttatgagaataaggttaaaacgaatattgacaagtctattcagaatcttcatctggaggaccagatccttgatgttcaggtgcctgttcaggaggtcattgaggtaaaagacggcaagaagaaaacggttcagaagaaacttttcccgggctatgttttactccatatgatcatgaacgatgagacatggtatgttgtccgcaatacccgcggtgtcacaggtttcgttggtccggaatccaagccggttccgctgactgaggaagagatgactgcaatgggaatcaatatgaatgacgctgagaaggatgagccggatcagatgattcttgttgatattgaagagggcgacatggtcaatattgtatctggtgcatggcaggacaaagaaggtatcgtgcagtctgtgaattcagcgaatggaacagtaactgtcggacttgatatgtttggccgtgagacagcagtcgaaatcagtttcttagatatcaggaaaatgtaacatttacgtacggttcatgacctgggtcatggacagtgggagggaaatccccgacattaccacaattttcaggaggtgcgctaataatggcgaagaaagtaacaggatatattaaattacagatccctgcagcaaaggctacaccggctccaccagtaggtccggcattaggccagcacggtgttaatattgtacagttcacaaaggaattcaatgctagaacagctgatcaggctggtatgattatcccagttgttatcactgtttataatgatagaagcttcagcttcatcacaaagactccacctgcagctatgttattaaagaaagcttgcaagattgagtccggttctgcaaactccaagaagcagaaagtagctactatctccagagcagaagttcagaagattgcagaactgaagatgcctgacttaaatgcagcatccatcgatgcagctatcagcatgatcgctggtacagcaagaagcatgggtatcacagtagaagactaatacgaatacttgttaaataacagtgggagggtcgctcccgatattaccacaaggaggatttatcatgaaaaaaggtaagagatatgtagaatctgccaaattagtagatcgtacaaatctttatgatgtagaagaagcagttagtatcattaagaagacagcaaacgcaaagtttgacgagacaatcgaagctcatatcaaactgggtgttgatggccgtcatgctgatcagcaggtacgtggcgcagttgtactgcctcatggtacaggtaagaaggttagagtacttgtatttgctaagggcgacaaagtagaagaagctcaggcagcaggtgctgatttcgtaggtggacaggaactcgttccgaagatccagaacgaaggatggcttgactttgatgttgtagttgctacaccggatatgatgggtgttgttggtcgtcttggtcgtgtactcggtcctaaaggcttaatgccaaacccaaaagctggtacagttacaatggatgttacaaaggctgttaatgatatcaaagctggtaagattgaatacagactggataagacaaacattatccacgtaccagttggtaaagcttctttcacagaagaacagttagcggacaacttccatacattaatgggcgcaatcgttaaggcaaaaccagcagctgctaagggtcagtacctgaaaagtgtaacaatcacatctacaatgggccctggtatcaaattaaacccagttaaacttgtttaattatttttaatttgatgtgtttttttgattgacaaccaacataaatgatgatataatatcagagcaaaactgccaaagacagtaggtgccgtaaggcataaggagaaaacgcctaccgagggagattataggtgttctttatgaactcgacttatatcaagacctctctgggcagccggagaggtcttttttggcggtacacacgattattctataaggaggtgcaccaataatggcaaaagtagaaatcaaacagccaatcgttgatgagatcgctggttatttagcagatgctcaggcaatggttctggttgactatcgtggtctgacagtagaagaagatacacagcttcgtaaggctttaagagaagctggcgttgattataaggtatacaagaatactttaatcaaacgtgcagttaaaggtacagtatttgaagctgtaacagatctttgcgaaggcccaacagctatcgcaacaagcgcttcagatgcaacagctccagctagagttttatatgaagcagctaagaaaatgccgaaccttgaacttaagggcggtgttgtagatggtacattctatgatgagaagatgatccaggttatcgctacaattccatcaagagaagtactgctcggaaaattacttggaagtatccagtcccctattaccaactttgctcgtgttattaagcagatcgctgaaagcaaagaagaagttgcataaaatctaaaaacggaggtattttaaaatggcaaaattaacaacagctgaatttatcgaagctattaaagagttatcagtattagagttaaatgaattagtaaaagcatgtgaagaagaatttggtgtatccgcagcagcaggtgttgttgtagcagcagcaggcgctggtgaagcagcagaagaaaagactgaattcgacgttgaattaacagaagttggccctaacaaagttaaggttatcaaagttgttcgtgaaatcacaggtcttggccttaaagaagctaaagaagcagttgacagcgctcctaagacacttaaagaagctgttagcaaagaagaagctgaagaaatcaaggctaaacttgaagctgaaggcgctaaagttacagttaaataattgtacttttcaatttgatatggaaggcatctcttcggaggtgccttttgttgtatgtgtatccagcaaagctgaaccatacttgccggtgtgagtcatcatatgggaaacgtgagagggcatatttttttaataattcattgcactaaaaaggagatttatacacagatgaagcagagaaagcctggatgctatatagctgcggtgcttctggcaggattaatgcttgggggatgcggtaatccgaatgctaaagcgaatacggcagaatcggtgtcggcgagtgattctgagacagtgtctgaatcagaggagatcgtgtcggcagaagcagagacagaaaatgggtttgagacagaaactgagacagaaactgaaatagaaacggaaacagatccgattgtgattgtgttggatcctgggcatgattcggagtattgcacgagaaatcatccggatctgggggtgaatgagcaggatctgaatttgacgattgcgctggcctgcagagacagactgcagcagtatcaaggcgtggatgtttatatgacaagggaggatggcagctgcccggatgccgaacatcagggagagtactgcattgagaaaaggacaggatatgccacggatttgggtgcagatctttttgtaagcctgcataataacgggacaaccggtgtatacggggcagaagccaatgggacagaagtctatgtgtcgaattacagtgcctatacggaagagggcaaaaagctgggacagatggtgctggataatttggcacagcttgatctaaatccgagaggggtatttgtccggacaaaagaggaaaaaggacattatgatgacggcagtgtacaggactggtattatctcatcagttacagtgtggagggaggacatcctgggatgatcattgagcatgcttatatggacaatccacacgacaatgctattttgaaagacgaggcgcagttgaaggcaatgggaacgactgatgcagatgccattgccgcctattataatttgcagataaagacaaaaactgagaattaatggagagattcagaacaaaatttccaaaataataacgaaaaccttaagattttgcagattgcgcgggggaggaacagttcaaattgactttaaagggtgaatggtttataatttgtaatatatatgtaacaagttgagaatggaggggaatgaatgagcaatacagaagatagaaacgatgaaaccatcaatttggatttagatgagcatacatctgcggaagatgctgatatggatgtgaatacagaggcgaatgcgaatgcagatgatgattttgattatctgaaggaaatagaagagattgaagctcaggagaaggagctggaagaacagcgccagaagaaaaaagaagaattagaaagacgtcgtgaagagcgtgagaaggacgagaagaagagtgccgcacagcgcaaacgtgaaatgaaggaacgtaagaaagaggcagaatggctgggagagccttttgaagatgacgttgaaaccgttccgactgcaaagaagaaaaagagcaaaaagggtcttgttgcaattgttgttattgtgttgatcgcgttggcaggcggtgctgcttttgcttacaagatgcaggcagataagaaggaactggctgatttttcacagaaagtggctgcattccagtctgagaaactggacggcagggattttggttcccatcagtcctattttacagatttcatgaaagagtgccaggatgcgattgatgccggagacctcaagaagatggaagatctggacaagaaatggagtgaagtagagaatacttacacaaccgtttccaacggcaagacgtcactggatgcttttgcttccggtattgatcaggcactttcaacgtattccatcacagatgattataaggccacatatgagacattgaagaaagatgtcgaagcggctcagaaggactgtgattatgagaaggtcagcgatttccagaaacagctggatgccttagctacgaatctgaagtcagacaatctgaaagtgatccagaatctgaagaatgacatttccagtgtcagcctcgacaaggattatgtcagtgcggatgaccagaagaaactggatgcctacagtactgaagtggagaagtacatcaaagaagagaattacgcacaggcagtgacaacactgaattcctggaagacagatgttacagccttgaagaagaccatcgatgacaagaaggcggcagagcaggcgaaggcagagtcagaggctgagtcgaagcgtgcagctgaatctaaggctgcagagtccaaggcagccgaatcaaaagcggctgaatccaagaagaatcagacaactgagacgaagaaggacagcagtaagaacaacagcagcagttctaacagcagcgcatcgtcagattatgttttgccgggcagcagcagtcagtacctgtcagcttctgatgtgaagaatctttccagctatcagctgatgatcgcacgtaatgagatttatgcccgtcatggacgtaagttcaacgacagtgaacttcaggcttatttcaacggcaagtcctggtataagggcactgtgaatccggaagatttctctacatctgtatttaatgattacgaaattaagaatattcagttaattcagtcttatgaataacacacaggagactgtcgtacgaagaaagaaaagtgcggcagtctattttttatgtaaaaaattaatttacagaacagaaacttgttgacagaacttgaaaattatgttagtatatattactgcattattatggtatattaggcgcattagcctgataagcagatagaacttgttgatttatcattcagggagtgaaaaacgtcaatgaataaaagcagaattaaaccggttaaatcaggtagaaacatccgtatgagctattcccgtcagaaggaagttcttgagatgccgaatctcattgaagttcagaaaaattcctacgattggttcctgaagaagggcctgaaggaagtttttgaagacatttctccaatcacagactacagtggtcatcttagtcttgagttcacagatttcagtttatgtgaagaggaagcaaagtattccatcgaggaatgtaaagagcgtgatgcaacatatgcggcacctttaaaggtgaaagttcgtttaattaataaagaaacagatagtttcagcgagcatgagatcttcatgggagatctgccgctgatgacagcaacaggtacattcgttatcaatggtgctgagcgagttatcgtcagccagctggtacgttcccctggtatttactatggtgtgggtcatgataagcttggtaaggagctttactccgcaactgttatcccgaaccgtggtgcatggctggaatatgagacagattccaacgatatttactatgtacgtgtggacagaacacgtaaggtacctgttacagtgctgatccgtgcactgggtgttggtacgaaccaggagatcatcgatctcttcggtgaggaaccaaagatcatggcaacactgtccagcaacaaagatgtatcagacagttaccagagcggtctgcttgaattatacaagaagatccgtccgggtgaacctctggctgtagaaagtgctgagagtctgattaatgcgatgttcttcgatcctagaagatatgatctggctaaggttggccgttataagttcaacaagaagctggcattgaagaaccgtatcacaggttttgcactggctgaagatgttgtagatgagacaacaggcgagattattgcagaagcagacacaatggtaacagaagatctggctcagaagatccagaatgcaggtgttgctgctgtgtatgttcagacagaagaacgtgttgagaaggtcctctccaacatgatggtagagcttactagtttcgtggatgttgatccagaaacactgggcattactgagaagtatgtttattatccggttcttcgtcagatccttgatgagaacgaagacattgaagatattaaggatgcaattaagaagaacgcagcagatcttgttcctatgcatatcacaaaggaagatatctttgcttctatcaactacaacatgcatcttgaatatggtgtgggcaatgcagatgatattgaccatttgggcaaccgtcgtatcagagctgtcggcgagctgcttcagaaccagtacagaatcggcctttccagaatggaacgtgtggtacgtgaacgtatgacaacacaggatctggaaggtgtttctgcacagtctctgatcaatatcaagcctgtaactgcagcagtgaaggaattcttcggaagctcccagctgtcacagttcatggatcagaataacccactttccgagttaacacataagagacgtctttctgccctgggtcctggcggtctttcacgagacagagccggtttcgaagttcgagacgtacattatacacattacggcagaatgtgtcctgtcgagacgcctgaaggtcctaacatcggtctgatcaactcccttgcaagtttcgcaagaatcaatcagtacggtttcatcgaggcaccttacagaatccttgacaagacagatcctaagaatccgcgtgttacagatgaggttgcttatctgacagccgatgaagaagataagttcagagttgcacaggccaatgagccaatcgatgagaacggttacttcgtgaacaagacagtttccggtcgttatcgtgaagagacaacatctttccagcgttcacaggtggatctgatggatgtatctcctagaatggtattctctgttgcgacatctatgattcctttcctgcagaacgatgatgcgaaccgtgccctgatgggttccaacatgcagcgtcaggccgttcctttgatgctgactgactcaccggtagtcggcacaggtatggaagccaaagcagccgtagactcaggtgtctgcgttgttgcaaaacgcggcggtgttgtagagcgctccgcatctaatgaagtcattatcaaggctgatgacggtacaagagacacttacaagctgctcaagttctccggatccaaccagggtgcatgctacaaccagcgtccgattgtattcagaggcgacagagtagaaaaaggcgatgttctggccgatggtccttctacatcacagggtgaattagcccttggtaagaacccactgatcggtttcatgacatgggaaggctacaacttcgaggatgccgttctgttaagtgaacgccttgtacaggaagatgtttatacatctatccatatttccgaatacgaagcagaagccagagatacaaagctcggacctgaagagatcacacgtgatgtaccgggtgtcggtgatgatgcgctgaagaacctggatgaaagaggtatcatccgtgttggtgctgaggttcgtgccggagatatccttgttggtaaggttacaccaaagggtgaaacagagctgacagcagaagaaagactgctccgtgccatctttggtgagaaagcacgtgaagtcagagatacatccctgaaggtaccgcatggtgaatatggtatcattctggatgcaaaggtatttacaagagaaaacggtgatgagctgtcacctggtgttaatcagtgtgtacgtgtttatattgcacagaagagaaagatttccgttggtgataagatggccggccgacatggtaataagggtgtcgtttcccgtattctgcctgttgaagatatgccattccttccaaacggtcgtccgcttgatatcgtgctgaaccctctgggcgtgccttcacgtatgaatattggacaggtcctggaaatccatcttggtcttgctgcaagagcacttggattcaagattgagacacctgtattcaatggtgccgatgaaaatgacatcatggatacactggaactggccaatgattatgtcaatacatcctgggaagaattctccgcgaagtggaaagataccctggatgaaaaagtatacaattatcttgatgagaacaaggcttacagagaagagtggaagggtgttccgatcagccgtacaggtaaggttcagttaagagacggccgtacaggtgaagaattcgacagcccggttacaatcggtttcatgcattatctgaaactgcatcatctggttgatgataagatccatgcacgttccacaggtccttatgcccttgttacacagcagcctcttggtggtaaagctcagttcggcggacagcgtttcggtgaaatggaggtttgggcactggaagcatacggtgcagcatatacacttcaggaaatcctgacattcaagtccgatgatgtgacaggtcgtgtgaaagcatacgaagccatcatcaagggcgagaatatttccgagccgggtattcctgaatccttcaaggtattgctcaaagagctgcagtcactggcactggatgtcagagtccttcgtgatgaccagacagaagttgaacttggtgaaacggttgattacggtgatgacgatttcaacagcatcatgcagggcgatggcggtttcagatttgatacagaagaatcccttggcgattatgtccacaaacagcagactgtcaacagtgatggtgagtttgtagatgttgaagatgagggcagtgccgatgacgatacagaagagttttatggagaagattctgacaacgaatagagaagggagtgccattcatgccagaaacagttagtaatgaagcttatcagccaatgactttcgacgccattaagattggtctggcttcccctgagaagatcagacagtggtcccatggcgaagtcaagaagcctgaaacgattaactatagaacattaaagcctgagaaggatggtctgtactgcgaaaagattttcggacctagcaaggactgggaatgccattgcggtaagtacaagaagatccgttacaaaggcgtagtctgcgatcgatgcggcgttgaagttacaaaatccagcgttcgtcgtgaacgtatgggccacattgagcttgcagctccggtttctcatatctggtatttcaagggtatccctagccgtatgggtctgatcctggatatgacaccgagaaaccttgagaaggttctgtactttgcatcctatgttgtgctggataaaggcagcacaacactggagaacaagcaggtattatctgagaaggaataccaggaagagtgcaagaacttcggtgaagacagtttccgtgtaggtatgggtgcagaagcgattatggagcttctgcaggccattgaccttgaaacagaggctgttcagctcaagaaagacctgaagacatcttcaggccagaaacgtgcaagaatcatcaaacgtctggaagttgttgaagctttcagaagctcaggcaacaagcctgaatggatgatcatgaccgttattccggttattcctccggatatccgtccaatggtacagttagacggcggacgttttgcaacatccgatttaaatgatctgtacagacgaatcattaacagaaataacagactgaaacgtcttcttgaactgggcgcacctgacattattgtcagaaatgaaaagcgtatgcttcaggaagcggttgatgccctgatcgataacggtcgtcgtggccgtcctgttacaggtcctggcaacagagcgctgaaatctctttcagatatgttaaaaggtaaacagggccgtttccgtcagaaccttcttggtaaacgtgttgactactcaggtcgttccgttatcgtcgttggtcctgaactgaaactgtatcagtgcggtctgccgaaggaaatggctatcgagctgttcaagcctttcgtcatgaaagaactcgtatccagaggcattgcacacaacattaagtctgccaagaagatggtagaacgtcttcagacagaagtttgggatgtactggaagatgttatcaaagaacatccggttatgctgaaccgtgcacctacactgcatcgtcttggtatccaggccttcgaacctgtactggtagaaggtaaggcaatcaagctgcatccgctggcttgtacagctttcaacgccgatttcgatggtgaccagatggctgtccatgtaccgctgtttgtagaagctcaggcagaatgccgtttcatcctgctttctccaaacaacttgttgaaaccttccgatggtgcgcctgtagccgttccttcacaggatatggtccttggtatctactatctgacacttgagaagccgggggataaaggtgaaggtatgttcttcaaggatgtcaatgaagcactccttgcttatgagaaccacatcatcacacttcaggctccgattaaggtcagaagaacaggtatcgtaggcggagaagaggtaacaagagttgtttcctccacactgggccgtttcatcttcaatgaaggtattcctcaggaccttggctatgtagacagagagaaccgcgataatgaccttgtaccggagatcaacttcctggtagcgaagaaacagctgaagcagatcattgacaagtgtattcatacacatggtgcaacaaagactgcggaagttctggactacatcaaagcaacaggttataaatattcaacaatcagtgccatcactgtatctatttcagatatgacagtgcctgaagctaagaaagagcttcttgcaagtgctgaagcaacaatttccaagattacagcacagtaccgtcgtggtcttgttacagacgaagaacgttacaaagctgttatcgagacatggaaacagacagatgaccagctgacaaaggctctgttggatggtcttgacaaatacaacaacatttacatgatggccgattcaggtgcccgtggttccaaccagcagatcaaacagctggctggcatgcgtggtctgatggctgatacatcaggccgtatcatcgagttgccgatcaaatccaacttccgtgaaggtcttgacgtactggagtacttcatttctgcccatggtgccagaaagggtatgtccgatacagccctccgtacagccgattcaggttacctgacgcgtcgtcttgttgatgtatcccaggatctgatcattcgtgaaatcgactgtagcgaagattcagagaacattccgggtatgtggatcgatgcattcatggatggccgtgaagttatcgaaagtctggaagaacgtatgactggtcgttacgctgctgccgatatcgtagatcctgcaacaggtgaagtccttgtaaaagcagatcatatgatcacaccaaagcgtgcagctatggttgcagaagcaggtgtgacaaaggtgaagattcgtacagcactttcctgtcgttcacatcttggtatctgtgcgaagtgttacggtgccaacatggcaacaggtcaggttgttcaggtgggtgaagctgtcggtattatcgccgctcagtccatcggtgaacctggtacacagctgacaatgcgtactttccataccggtggtgttgccggtgatgatatcacacagggtcttcctcgtgtcgaagaacttttcgaggcaagaaaaccaaagggtcttgccatcatcgcagagttcggcggtacagtttctatccgcgatacgaagaagaaacgtgaaatcgttattacaaacgacgagacaggtgattccaaagcatacctcatcccttacggttcccgtatcaaggttcaggagggacaggtacttgaagccggtgatgaactgacagaaggtagcgtcaacccacatgatattctgagaatcaaaggcgtgcgtgcggttcaggattacatgatccaggaagtacagcgtgtataccgtctgcagggtgttgaaatcaacgataagcacgttgaggttatcgttcgtcagatgctgaagaagattcgtatcgagaacagcggagatacagaattcctgcctggtacactggttgacgtccttgacttcgaggaaatcaacgagaacctcaaggaactgggtgagagaccggctgaaggtgtccaggttatgcttggtatcacaaaggcttctcttgctacaaactccttcctgtcagctgcttccttccaggagacaacaaaagtcctgacagaagctgctattaagggtaaggttgacccactgatcggtctgaaagaaaatgttcttctcggcaagctgattcctgccggtacaggtatgaagcgttatcgtaccatcaaactggattcagaaatcgacgagaatgaagaactgacactggccaatgatgacgatgcatatcttgatctcagcgacggcatctcaggtgaagaagcagatgaagatatggctgaaacagaagaaacagctgttgaaactgcacctgaagaagcagaagatgatgcattcgacggtgaatctgaagacgatacaacagatgaaaactaatcgttatgaaggttttgaactttcattaacataatacaagtctaagaagcagtatggttgctgatcacatcgtatcaaaggccatactgctttttttactatctgctttcataaaacaggcctttgcgggatgacgacaggcctgaatcatggatacggaggcgtaaaggtgaataaaaaactgaatgtgaaaggtttttgtacggatctggcctatgatttggttggttccgtattgtatgcagccggtattgtctgctttgttaatccggcgaatatggctccgggcgggatgtccggtgtggctattttgttaaattatctttggggactgccaatcggtaccatgaccattgtgctgaacatccctctgctgattttgtcctatattttccttggcaaatctctgacatggaaaacagtgaaatcactggtgatcagcagtttaatggtggatttggtcatggccagatatgcaccgatttatgcaggtgaccgaatgattggcggcgtttttggtggtgtactgatgggtgccggtttggcgattattttcctgcggggttccacaaccggcggtacggatattatttctttccttgtgaagaagtggtatcctcatgtgcctatcggccgaatgatcatggtggtggactgcattatcattggtgtatctgtccttgtattcggcaatctggaatctgccctgtatggtctgatttccctgtattgctgttctatggtcattgacagtattatttatggtctggacaaaggcagtatggtgatggtagtttcagagaagaatgatgaaatcgcggcacagatcatggatgaactggaacgcggcgttaccttgctgaaaggccagggagcctataccggtacggacagggatgtgctgatgtgtgcagtacgcaagcagcagtttgccagagtccgggcgatcatttacgaaaaagacccgaatgcttttgtgattgtcagtgaaaccagtgaagttttgggcgagggattcaaacaagtgtccggcctataaagacaaatgtttatttgtctttagcacaatgacaaagtgaagagatatgactggaaactgttgacaaatgaaagtcataataataaaattgaacgtaaagcatgagagaaggaggatttaaaatgaaaaagttagttagtttcatgttagttgctgctatggtagtggcaacattaactggctgcggcagttcagataatgcaaagtcaactgaggcagctggcgaatcaagtgccgctggcgaatcaagtgccgctgcaggcacaacatttaagattggtggtatcggccctgtgacaggcggtgctgctctgtacggtctggcagtacagcgtggtgctcagattgctgttgacgagatcaacgcagcaggcggtatcaatggtactcagatcgagttcaatttccaggatgatgaagcagatgctgagaagtcagttaacgcttacaactccctgaaagactggggtatgcagatgctgatgggtacagttacaagtacaccatgtgtttctgtagctgctaagacagcagaagacaatatgttccagttaacaccatccggttcatccgtagaatgtgtacagagcgacaacgcattccgtgtatgtttctctgacccagaccagggtaagaaatccgcacagtacatcggcgaacacaaactggctacaaaggtagcagttatctatgatagctctgatacttattcaacaggtatctatgaatcttttaagagcgaagcagctaatcagggtatcgaagttgtagcagaaggtgcattcactgctgataacaagacagacttctctgttcctcttcagcaggcacaggcagctggtgcagaacttgttttcctgccaatctactatacagaagcttctctgatcattacacaggctaacaagatgggctatgcaccacagttctttggttgtgacggtcttgacggtctgatcggtgttgaaaacttcgaccagtctctggcagaaggcgttatgcttctgacaccattcgcagcagatgctcaggatgatctgacacagaaatttgtttctgcatacaaggacaaatacggcgaaacacctatccagttcgcagcagatgcatacgatgctatctatgcaatcaagcttgcagctgagaaagagaatgtgacacctgatatgagtgtttctgatatctgcgaagctatgaagaagggcatgacagagatctctcttgaaggtctgacaggtacaatcacatggacagcatccggtgaacctgataaggaacctaaggctgttaagattgaaaacggtgcttacacagccatggaataatcggtgtgtctgacgcgattgtacaatcgatttagattttactaaaagataaaggggacaggattttcctgagcgggaattgaagtggattcctgaaggaagatctgtcctcttttttatcaggtacatggagaattaccggacaggccggacggtcggactggataccgaactgcgttggcaagacatcatagcatagctataacttctgattagagctgatatcagcaatcgttataacctgcatttatgaggcggaagtcaagaggttgaattcagatttttcatgtgctatactttttgataagtatctaaaaaaatacaacagagaggtgttattatgcaatttatttcttatttgattaatggcatcagtctgggaagtgtttatgcgattattgctctggggtatacaatggtatacggcattgctaagatgctgaattttgcccacggtgatatcatcatggtcggcagctatgtggtttacattgctgtcagctctcttggactgaatccgattctttcggtggttatatcagccattgcctgccttgttctgggtgttgttattgagaaggtggcctacaagcctctgcgacatgcatccaaattggccgtattgattactgccatcggtgtcagctattttcttcagaacgtagcactgctgatatttggtgccaatacgaagtcctttacatccgttgtaccggctgtttctgtgaagctgggcggtattacaatcacagctgagacaattgttaccattttagcctgtgtgattatcatgatctgtctgactttatttatcaataagacaaaggccggacatgccatgcaggctgtatctgaggatcaggatgcggcacagctcatgggtatcaatgtcaatgcgacaatttccctgacatttgctattggttcagcactggctgccgttgccggtgtgctcctttgttctgcatatccgtccttgacaccttatacaggtgccatgccgggtatcaaagccttcgttgccgctgtattcggcggtatcggctctattccgggtgcgctgatcggcggtatccttcttggtgtgatcgagattctttccaaagcctatatttcttcacagctgtcagatgccattgtattcggtgtcctgatcgttgttctggttgtgaagccgacaggtatccttggtaaggtaatacaggagaaggtgtaggtgacagtgatgaagaagaaattgaacaaaacaacaaagagcaatctgattacatatgcaatggtggtcattgtctatattattgtacagctgcttgtttcaggcggagccgtttccagtctgatgaaaggcctgcttgtgccattatgtgtttattccattctggctgtttcactgaacttaacagtcggtattctcggtgagctgagccttggtcatgcaggtttcatgtgtataggtgcttttacaagtgcgacattctcaaagcttaccaatggtgtgatccagcctgcagggttcagatttttcctggcaattcttgtgggtgcggtatttgcaggtatctttggtcttttgatcggtattcctgttctgagactgaaaggcgattacctggccatcgttacactggcttttggtgagattattaagaacattgtcaatgttatttatcttggccgtgacagtcatggtattcacttttctatcaaagatgctgcctcccttggaatggatgcggacggtgagatgatcatcaaaggccctcagggtatcacgggtacaccgacggattccacattcaccatcggtattgtcctgattcttgtgacattattcattgttttgaatctggttcattccagatccggacgtgcgattatggcgattcgtgataaccgtattgcagcagaatctgttggtattaatatcacaaagtataagttgatggcattttccatctcagctgcactggcaggcgtggcaggtgtgctttatgcccacaatctgtccacgctgacagctctgccgaagaactttggctacaacatgtctatcatgattcttgtatttgttgttctcggtggtatcggcaatatccgtggttccattatcgctgcagttctgctgacaatgctgcctgaacttttacgaggtctgaacgacttccgtatgctgatttatgctattgtactgattgcgacaatgattattacgaacaatgagaagatcatgaatacaatccgtcgtttcctgccgaagaagcaggcacagccggtaaaggaggagacgaaataatggcaatgcttgaagtgaagaatttaggaatatcctttggcggtctgcgtgcggtagatggtctggatatgacaatcgaaaagggtgagctgtatggattgatcggaccgaatggcgccggcaagaccaccgctttcaatatgctgacaggtgtctacaaaccgacagacggcgtgatcaagctggatggtgaagacatcacaggcaagagtaccattgagatcaataaggcaggtatcgcccgtacattccagaatatacgtcttttctcggaattatctgttttggacaatgtcaaagtcggcctgcacaatcattacaaatattctacaatcgcaggtatcttaagactgcctgcttaccgtaaggcagagaaggaaatggatgcgaaagccatggagcttctgaaggtgtttaatcttcaggatgaatgggattacaaagcatccaatcttccatatggtaaacagcgtaagctggagattgcccgtgcccttgcaacggaaccgaagcttctgcttctggatgaaccggcagccggcatgaacccgaatgaaacaggagaactgatggataccatccagttcgtatgcaagaactttgatatgacggttcttctgattgaacatgatatgaaacttgtatccggtatatgccagaagctgacggtattgaacttcggtcaggtactggctcagggcaagacaagtgatgttttaaatgacccgaaggttatcaaggcctatctgggagaataaggagagtagtatcatgtcaatgttaaaagtcacagatttacaggtatattacggtgtgatccaggcgttgaaaggtatctcctttgaagttaatgaaggagaagttatcgcgttgatcggtgccaatggcgccggcaagacaaccatcctgcataccgttaccggcctgatcaatcagaaagccggcaagatagaatttgaaggcaaggatatttcccatataccggcctataagattgtagcagagggcatggctcatgtgccggaaggcagaagggtctttgcagaactctctgtttatgataatctaatgatgggagcctatacacgcaaagataagaaagaaatcgcagagacactggcaatggtttacaagcgtttcccacgtcttgaggaacgtaagaaacagatggccggtacattgagcggcggtgagcagcagatgctggctatgggccgagcgctgatgtccaagccgaagatcatcctgatggatgagccttccatgggtctttctccgattttcgttaatgagattttcgatatcatcaaggctgtcagtgccagcggtacgacagttcttctggtagaacagaatgccaagaaggcactgtctattgctgacagagcttacgtccttgagacaggcaagattatccttgaaggcgatgcaaaggtattgatgaatgatgagagagtcaagaaagcttatttaggcgaatagaggcatctctgaaggaggggttttatgggcagcaacagaatcattacaattgcaagacagtacggcagcggcggtaagaccgttggtcagatgctggccaaagatctgggcatcgactgttacgaccgtgagattttgcgtatggcttctgatgacagtggtctgaatctgcagatgttcggcaatccggatgaacgccgcagaaacacatttctgacccgggccatcaagaaagtctacaaaggtgaagtgattccgccggatagtgatgattttgcatcatctgacaatcttttcaactatcaggcaaagattctgaaagaacttgcagaacaggaatcttatgttgtcatcgggcgatgtgcggatttcattctgagagacaatccgaatgttgtcagcgtattcatccatgcaccatttgattactgcgtagaccgcggtcttgagaaacagagtatgacaagggtgcagatggagaaatacatccagaagacagacaaacagaagggcgattactacatgtatcacacaggccaacactggtccgatgcacgtaactatgatctctgtctggacagcagcaagctggggtttgagggatgtgtagaggcgatcaaggcttatatggcggttcgctttaaagagcaataataaaaaacgggctgcgaagcctatttagtactagaaaagcaacactatgaacgatttatttatgaattcgttcatagtattgcttttttcttatgattctgaaaagcagattggtatccggatggcttattacatgattatgtatggaataaaatcaaagtggaagtagatgatgacgaagatgatgaatactaaaaagagtttatgtatactatggttgctactggcatattacctatgatattataattaacaagaatattaatttattgattgacgagcggaaagaaggcataaaatgacaacagagcagcagtacatcgcatcattagatatagaagcatcctacaatctggccaagcagatggaggcctaccgcacgaatcctgttctcggctaccgaccggcgggctcaaaggcagagtttgagaccggggagatgctgaagtcttatatggaagatttgggactatccaatgtccgcaaggatgagattaaagtggacggttgggagtttgagaaggcggttttagcctatgcagatgcagcaggcgagagacaggaagttcaactgggtgcttatcagacggattttgtgacaaaaggcgcagaaacatttcaggttgtttacgtgggtaaaggcggcgagaaagattatgccgataaggatgtgacaggaaagattgtgctggcggagatcaaccagagggatgaatggtggattaattttccggtgtatcaggcccatgagaaaggggcaaaagcgctgatcgctgttcagatcggcggatatggacaggtagacgagaaggctttgaatgcccaggatatagcgggacctccggaggcagcagctttttctatgtcctttgaagattctgagaaattgaaggcatgcctggatgaaaaaggtgagattaccgtcactctggatgccagcagccgggtcatgcgggatgtttctacttataatattctcggggagattccgggcagacgatcggatcgaatgattcttctgtcggctcattacgattcctatttcagcggttttcaggatgacaacacggcggtggccatgatgcttggcattgcccgggctttcattaaaatgggctatcagccggagaatacatgggtattctgcgccatggctgcggaagaatggggtattgccgattccaagtacgactggtcaaccggcgcttatgcggaggtgtttaatgtccatccggaatgggcgggcaaagtgatcggtgatttcaattttgaattgccggcactttccaacggcaatctggatggtattcgctgtacatatgaatacaaagacttttttgaagatacattaaagacactgccggcactttcaccggcctatccggaaggtgttcttgtatcggcaccgattgaaacctggtcggatgatttttccgtggctatcagcggcattccatccatggtcaatgaattcagtgcaggttcatttatgactacacactatcactcgcagtatgacagcgatgcatattataatgaagcggcttatcgattccatcatgaactttacggtctgcttttgatgcatctggacagacagtctgtggcaccgctgaattttgcggaagtttttgagcaggcatctgccagcctggatgtgctgatgtgccagaaatccggcagcagggttactgcacttttgaaccttctgggtcagacagaagaggtggcagaagaagtttatgaccgtatttatgatatcaatgaggctggagtggattctgaacaatgccgtgaggctgagaacattctgctgaaagtattcaagatggctcaggacaaatatgttcgtcttacatgggaagatgcggttgtgtttccgcaggaggcggctcagaataatctgcggtatctgaaaaaagccattcgcgctttgaagcgtaagataccggatgccgaggcagcttttgaagctttatatgagattgataacaatgcctatgctttccagttttcaaaacaggtctatgagcggtttacagattatgttcttgaccagaattcagaccgtcttcagtggggacggggacgcattgtacatcatgagaatctctatgatttggtggcacaattaatggataaatatcatcagggagcgacagattttgcaaatgaaattgcagagcttgaaaaggttgcaaaacggcagaaagcctaccttagagatgatatcgaatacatgctgcagtctacagagaaaatgttgcttttgcttcaggcagccaatgaacggctgaaaaatatacaggagaaaaattaattattatggaaagtgaaagactatatcaggtgcagaaagaggacctgccgaaactggagaatttgctgacgcagtgttttagagaggatccgctttatcatagcctgattccaaacaaagacgtcagggaaaggctgatgccggagctttttaaatgtgatctgacggagttctatgaatgttgtgatatttatgcagacagcccggaatgcaacagtctgttggtggtttccgatgaaatggaaccctatgagcatttatttaaagcgtattttacagaaattgcggcagcattaaagacggatggttatcttctgaaagaagatgcttccatgcatacattctggaatttcattctggggagggattacctgaattctgcatggacagaccagctgcatcagaagcatcgccttcatgtaatttatctggcggtgcgaccgaatatgcagcatcatgggttagcggatgtgctgatgaatgaggtgattcgatatgccgacaaacatcggatgatggtgtctttggagacgcacaatccggtgaatgtggaattttatcagcgttttgatttcaaggttttcggtattgtacagaaacactttgatctgaagcagtactgtctgatccgtgaaatcaggaaaaaaggggaataatttgaagggagcttacatatggagaagtatatgatcgcattggatcagggaaccacaagttcaaggtgtattttatttgatcatggcggacggattgccggagtggcacagaaagaattttcacagatctttccaaatccaggatgggtggagcatgatccggaggaaatctggcagagtattcaggatgtgatggcagaagccatggggaaggcacatgtcactgcggagaatattgccggcatcggtattaccaatcagcgtgagacaacggttgtctgggataaaaagacgggtaaaccgatttacaatgccattgtctggcagtgcagaagaacagcacctatcattgaggatttgaaggcaaagggctatgaagcctttatcaagaaaacaacggggctgatcccggatgcttatttttccgggacaaagattaaatggattctggatcacgtggaagacgccagggagcgggcaaaaaagggtgaactgctctttggaaccattgatacatggctgatctggaatctgtccggcggcaggatccatgtaacggattataccaatgcctcaagaaccatgctgtttgatattcacagcctttgctggaatgagcgtttgctggaagttttggatattccgatgactatgatgcctgaagtgaaatcgtccagctgcatttacgggtatacagatccggatgtgaccggcggcaccatcgctatttcaggggcagcgggggatcagcaggcagctttgtttggtcaatgttgttttgaagaaggcatggccaagaatacatatggcacgggatgtttcttgctaatgaacacagggcatcatgccgttgaatctgagcaggggctcctgacgaccattgcagcaggcacggatgaaaatgtggaatatgctctggagggcagtgtatttgtggcaggagcggctattcagtggttaagagatggcctggagcttttgaaaaaatcatcggagtcggaagcatttgctgaaagtgtggatgatacggccggcggttatgtggtgcctgcttttacgggattaggtgccccttattgggatcagtatgccagaggtgcggttgtcggtatcacaagaggctttacaaaggcccactttatccgggcaaccctggaatcactggcttatcaggtctatgatatactgaaagctatggagaaggatgcaggtattctgctgacggatctcagggtagacggcggtgcctgtgccaacaatttcctgatgcagtttcaggcagatcttctggaccgacatgtgcttcggccggaatgcattgagacaacggcccttggcgcggcgtatcttgcagggctggctgtgggctactggaaggataaggatgagatcaaacagaattggtcgctgtccaggacctttattccggatatgcagaatgaaaagcgtgagaaactgcttcagggctggcacaaagcggttcgatgtgcttttgattgggaagaacactaaaaaaaagggatataaagcaaacgttttgctttatatccctttgatttttgccgggtgagtgttatgcttacatcatgttaatggaggtgtaatgaaatatgatagtggtattttttgcggtcagtctgttggcatccatcgtgggctccatctgtggtatcggcggtggtgtgatcatcaaaccggtattggacgccatgaatgtgatgagcgtatcatgtattagttttctgtccggctgtacggttctgactatgtcggtggtatcggtatacaagaacatgcgtgccggcaagaaactgaatcttcggattgcgacattattggccgttggtgcagctgttggcggtgtggccggcaagatgatgtttatggcagtgaagacatccgtgggcaatgagaatttcgtaggcatggtgcaggcgatcgtgctgatcggcgtgacaggtataacgtttgtgtatacaatttttaagaagaaaatacatacactgacactgaataatgctgctgtgtgtgtgattgtgggactagtgctcggcattatgtcaagtttccttggtataggcggcggccctatcaacctgatggttctgggatttcttttttcgatgtccaccaaagagtcagcactggcttccctgtacattattgtcttttcacaggttaccagtctggttcagaccgtcgttacgggaacgattccgccggtgcagctgtcttatcttgcagtgatggtcatcggtggtcttctgggcggtacgatcggcagcaagatcaacaagaagatcgaggatgagaaagttgacaaattgtttatggcattgatgtttatcatcatctgcatcaatatttacaatacttataaattcgcagttgctctttaaaaagcaaacgtttgcgtcaaagctttagcagactaaaatggtttttggcctttttagtctgctttttcgtcacaaaaagtcggaagaaattcccaattttgtgttaaaattgaatatatcaaaattgtatcgttgaaaatacacaaaaaaaattttgtaaaatgtgcaaaaagtaggataacgtttggataaaataggccttattttaaacaaaaactgtgttaggataagtatatcaaaagaaacaaagcattgacaaaaaatgtaaaacatttgtgcacattatataattgtgtacaaaatgataggagtgcagataaatggcagataatcttttagttgtacatggaggcggaccgaccgcagtaatcaatgcatctttgtatggcgttatccgtgaagctaaaaagaatccatcaattggaaaggttctgggagcaattggcggaacaggcgcaatctttacagaacagtttcttgatctgacagcattttcagatgagaagctgaaacttctgcttcacacaccggcttcggccatcggatcatccagatatccgctgtatgaagaagattatgcgaagatgcctgagattttcaagaaacaccatatcggttacgttcttttaaatggcgggaatggtacgatggatgcatgtgaacatatttatgaagtttgtcgggatcacggcatcggtgttgcaggtattccgaaaacggtggataatgatattgcaatgacagatcatgtaccgggctatggcagtgccgccagatatctggcagcaacgacacaggaagtcggagaggatgttaagtcacttccaatccatgtcagtgtcattgaggccatgggaagaaatgccggatggatcactgcagcatcagcccttgcaagacgtaagaaaggtgatgcaccgcatctgatctatgtgccggaaagaccattccatgaagatgaatttctggaagatgtagaaagactttacaaggaaaaaggcggcgttgttgttgttgccagtgaaggtttgacgaacgtcaatggtgaatccattgttcctccgattttcaagagcgacagagctgtatattatggcgatgtcagtgcttatctggctgagttggtcattaagaaactgggtatcaaagccagaagtgagaaaccgggtatttgcggaagagcatctattgccctccagtcaccggtggacagagcagaagcaattctggtaggtgagctggctgtcaaagctgtgactagcggcaatggtggacatatgatcggctttaaacgtcagcccggggatatttatcaggttgaaccggtacttgtaccgctgaaggatgtcatgctttatgagagaaagcttcctgaagcttatatcaacgagagaggcaatgacatcacggatgaatttgtgaaatggtgcgaaccgctgatcggtggcccgcttcctgaattcctgaatttcagagattatatctaaaagtttcttatccatatactgggaagagaatagatgatacaatatagggaggaaattgtaacaatgaaacatatttatctgaatctgaagagatttgatattccaacagaggcaggcggcgtcaaccgcatcgcttcgccggcggaatggggaccatatattgtctcccacacacaggatcagctggcggcctacaatccaaaggatgtagagtttgccatgtttttcccggaagcccatctgattggtgctgtttcagcaagaaaagcagacagtgcattgaagatcggaccacagagtgttctgggacaggatacagccgttggcggcaacttcggtgcctttacttcaaatcgtacaggtaatgccatgaaagccatcgggtgtgatgctgtactgatcggtcactgtgaagagcgccgtgataagctgagtatcattgctgaaggcaagggtacagatgcagcagctgtcaaccggatcctgaacaaagagattaaggcagctattgcagctggtttggatgtactttactgtatcggggagaatgccgatgaacaaccaagatggcaggaagttctgaaggaacagttgacagtaggtcttgaagacgtagacaagagtaaagtcaccattgcctatgagcctgtatgggccattggacctggcaagattccgccggatgcagattatatccggaagattgcttcttatgtcaaggaagtgacagatggcatggatgttgtctatggcggcggcttaaagacagacaatgcgaagatgcttgcatccgtcaaagagattgacggcggtttgatcgcgttaacaagattttcaggagagattggtttttatccggatgaatatctggagatcattaagacttatctcggatattaattcacagtacatatcgtttacagacagaatttaaaatggaggttttttagaatgggcaagaagagcaaaggcgctgattttgtcggaaagattccaaagggtgtctggctgctgatttcattagtagtagcattgatattatggacagttttatcaatcatcccaagtacatccagatgttttccgaatgcgattaaagttattggttccatccagacgatggtttcaagaggtttactgttcaaggatatcggaagcagtttgatttccgtattacttggtttcctgatcggtttcgttacagccgttccggttgcgttcctgatggcatggtacagacctgtaagattcatcattgagccatggatccagttcatcagaaacattccaccactggcttacgtaccactggttgttatcggtgttggtgtcggtcgtacacctcaggtcatcgttatctggctggctacattccttacaatgacagtcacaattttccagggtgttatcaacgtggatgagacattgatcaaagctgcaagagtacttggtgcaaaggattcagaccttttcgttaaggttattttcccagcaacaacaccatttattatcacagctatccgtcttggtatttcaacagccctgacaacactgatcgctgccgaatcaacaggtgcagttgccggtcttggtatgcgtatcaaagcattatctaactcttatgaaacaacaccaatgcttctctacattattatcatcggtatcatcggtatgctggcagagaagattcttaaatattttgaaaggaagttaacaggatggcaggaaaagagggaaatataaaagtcagtattcgtaatgtcgtaaagaaatacgacacacgaaatggtgaaatgatcgctttaaatggtgccaatcttgacatcatggagaatgagtttatctgtgttatcggaccttccggctgcggtaagtccacacttttgaatattatcgcaggtcttctggaaccgacatccggtgaagttatcgtagatggacacaaagttgaaggtacaggcgtggatcgaggcgttgtcttccagcagtatgcactgttcccttggctgacagttaagaaaaatgttcagtttggtctgaaacttcagggcaagtcccagaaagaaatggatgacatcgctgagaagtatatcaagatggtaggtcttgagaagtttatagattcttatcctaaggaattatccggtggtatgaaacagcgtgtggccattgcaagagcttatgccgttaatccttctgttcttcttatggatgagccttttggtgctctggatgcccagacaagaacacagcttcagacagagctgttaaagacatggcaggaagagaacaagacatgtttctttgttacccatgatattgaagaagctatcgtactggcatcaagagttgtcatcatgagtgcacgtcctggacgtatcaaagagatcatcgatattgatattcctcatccgagagatcaggcaacaaagatgagtccgagattcgttgaattgaagaattacatttggagtcaggtatatcaggaatatctggaagttcagaaataataagtgaattattatcttacagaccgcacagaagcgtcatcttcaggaaatgactgctctgcgcggaatgtgagattataatgatacaggtgaacggcgtaatgaaccggtcaccgacacactttttttaggaaaaggagagattgggaaatgaaaaaaagaatcatggcagttgttgtaacagcagcaatggtaatgggtgctttagcaggatgcggaagctcatctgcaaaagaaacacaggcacctgcatcaacagaggcagcatcagaaactgctgcagcatctgaaacaacaggggaaacagaagcatcagatgcagcttcaggtgatctgacacatgtgaacgttgcttacatggcaaactacgcatcactgtggcaggtagcaacagcaatcaacaaaggatacttcaaggatgaaggtcttgatgttcagctttacatgttccaggacggtcctacagaaatcgcttctatggaatccggttcaattgatgtcgcttacatcggacctggcgcacacaaactgtgtatcaaaggtcaggcagatatcttctgcttctcacagctcggcaacgcagactgtgtaatgggtcttaaatctcatggtgtaaactcccttgaagatctgaagggtaagaaagttgcttatgcatccggtacatcttcagaaacaatcttaaagagagcacttaattccgttggcctgacaatggatgatattgaagcatatgatatggaagtcagcaacatggtaagtgcaatcgtttccggttctatcgacgcttgtgctccttggtctccaagctcaacaacaattgcaaacgaacttggcgatgatgttcagacattctgtacaaatacaacattctctgatatcgcagctgactgtgcaagctggatctgcatgccaagctacgcagaaacaaacaaagacgttcttgtgaaatttacaaaggctctttacaaagcaatggatttcgcttcaaacccagacaactatgatgaagttgcaggttatgttgctcaggaatgcggtacagacaaagaaagcgcacttgctcagactggcgacggtgcttggcttgacagcgcaacacttcttaaatatgtaggcgatggtacaatcaaaggttactatgaagtacagcagaagaacttcatcgacaatggtgatgttgaatctgaagtgcctgtagacgactatgtattattcgacgttatggaagaagcaggtaagtaatctgaatttttaattctttactgcagggcagtatctgccatctttaacagtaaaatggcagataaaagcaggtgccttgtggctcattaccatgaggcaccttttgtatgccgaaaaatgtcaaatttcggtgtaccgggtggcggcctatccgccgggtttccaattttctggaaacagacgacttataactcagataatattataatcgggaggaaataacatgaaacttgattttgaatatggattaggcacaatgcaggcagaactgccggataatacagatgtatttatttctggtgaaacagtgaaggatcctgcatgtattccggaggaccagttagaggctgcatatcttgagagcctggcacatccgatcggcatgccgacattaacggagcttgcacacaaaggtacaacagttacgatcattgttccggaccgtgttaaaggcggcgagcagccaacaagccatagaaaattaagcattaaatatattttaaaagaactttatgcagcaggcgtagaaaagaaagatatcctgtttatcatttccaatggccttcatccgagaagtaaagcatccgatgccaaggcaattttcggtgatgaactgttcaatgaattctggcattcaggtcagatcatcagccacgacagcgaagatcaggagcatatgatctatcttggtacaacaaagcgcggtgatcctgtttatatgaacaaatatgtttatgattcagatctgccgatcctcatcggtcacgtacagggcaacccttacggcggttattcaggcggttacaagcacagtgcaacaggtatcacaaactggagatgtatcgctagccatcatgtgccgtctgttatgcacagagacgactttacacctgttaacggcggcagcttaatgagacataaattcgatgagatcagtatgcatatggaagagaagatgggccatccgttcttctgctgtgatgccgttttggatacttattcaagacagattgcgatttattccggttacgctaaggaaatgatgccgatcagctggaaattggcagataagagaacttatgtccactgggcagagaagaaatacgatgtactggtatttggtatgcctcagaaattccactatggcgacggcatgggcacaaacccgatcatgatgatgcaggctttaagtgcacaggtacttcgtttcaagagaatcatgagcgataattgcgtcatcatctgttcatccgcatgcaacggctatttccatgatgaattatggccatatctgagagaacagtatgagctgttccagcatgatcatatgaatacactgccggatatcgatcgttacggtgaatattttgcaacaaatgaagaatatatccgcaaatatcgtttctgcaatgcgttccatccattccatggtttttccatgatgtcctgcggccatattgctgaaatgaatacaagtgccatttacattgtcggtgctcaggaacctggctatgcaagaggcatgggcttaaagacaagagcgacatttgaagaagcccttgaagatgccaagaagaaatttgttggtcagaatccaaacattctggcgctgcctctgacatacaagagagcagctgttcatttgtgcatgaagaatcctgaagaggactgcatggatgaatatgggcatcgtcactaatacggaggcgtttgaacaatatgatccaatttcagatgtttgatcatcagccggaacgctgtgaaaaatatcatcagatgctgaaggacaatctgccggtgcttgagggcatcggcagtgaagccgattttgaaaaatacggagattctctcggatggtttgatatcgatacatgggccaatgaggcagaattaagtgccattgaagaactggcagcaagggtgcgccgggatgcagatgtttttgttctcattggtgtgggcggttccaataatgcagcccgctcagtgattgaagcttttccggaatgtgatgggccggagatcgtctatgccggcaattcactgtcaccatgggcttttgaacaggtcatgaacaagattcgtggcaagtccgtttatattgactgtatcgccaagaactttcagacactggagccgggatcggcattcagggtactgagagaatatctttatgaaacatatggggataaggccaatgagcgtatcattgcaacaggctcccgcaatagtctgttggagactatctgcaaagagcacggatacagctttgtagaatttccgcagacagtgggcggcagatatacagcggtaacggccgtgggacttttgcctatggccgtggccggcattgatatccgtgcccttgttaagggggcagccgatatggcagctgagttaaaaggctgcagagacatcacacagtctgcttatcgctatgcggtggcaagaaatctctattataacgaaggatacagaatggaaatgctggcatcctttgaaccacagcttcactggttctataaatggtggatccagttatttgcggagagtgaaggcaaagaagatcagggactttatccgatcagtggtgaatactcagaggaactgcactctgtcggacagtttcttcaggatggcagccctgtgatctttgagacatttttacatgtgaaagatccgcaggcgtccatgatcgtccatccggatggtcgtgtgaaggatgattttgattatttgaatggcaaagacttcagagagatcaatgaagccgcttatggagccacacttcgtgcccacagtgaaaagatgccatgtatggtgcttgaggttgagaaattaacaccgtacagtttcggagagatcttttatttctttatgtatacatgctatgtatcagcgggaattctgggcgtgaatccgtttgaccaggaaggtgtggaagcctataaacagcgcatgttcaaagcccttggcaagtagaggtatttgggcgttaaaaagaacaggcctctcttaatgagaagcctgctgacgtaaggttgagaaaagtctgcggtcacgattgaggggacagcagctgtcacgtttggcaatataataaggcagaaaggttttaagcggcatccggtggccgccgcttacacggtcaaggagcaccttgaaagccattttgcccagttcatctgtcggaatatgaacggtagtgagcatcggagacatatattgtgcgatatcgatatcatcgatactgataacagaaatatcttcaggtacacggaagttcagtttttttagagcatgaagaacaccgatggctgtacggtcattggcacagaggatggcggaaaggtcatcacatgttctggccagcattttcatgccttcgtagccgccctcggatgtctgatggacattggcggtgttgcgctgggcaaatggcagattaagtttggacagggcttccttgtagccgctgaagcggggttccttatcctgctcaccgatatagccgataacagtatgacccagggatttcagataggaaatcgccgtatagacaatttcactgccgtcacagacaacctgatcgaactggaaatccattgggattaggccggtgtagacaacattcttgctgagattgctgaccagagaagcaatccgctggtcgtaacggccgagaacaacaataccgtcagcgggaaactgggtaagctgagcagcagtttcaggtcggccaaggtcctgggaagtaaaagagtagcgaatgaaatagcgacttttgatggcttccagttccaaagcctttacgatctgtgagaagaaaggatctgacatatccgtatgggttctggcataaacacaggcaatggacttgggatccggatcgcgaagctcggcagactgtccaagcttcagattgcgggctgttttattcggtgaatagccggtacgacggataatctcccatatacgggcctgcactttgggactggctgcttttgtattttcctgattgatgacacgggagactgtggatacagaaactcccgcttcctttgcgatttctttaagcgtcatagatgaacctcactgatagataagatgaccggttaacgaaagggtcatctgttattccgttgacaaagtgtctatatagtagtatagtacaaaatgtttttttttacaataaaaggtggtagcataacatgaaacatgaatattaccagtataatgcagaggagatcctgtccaaaggaccaaagttccctctgattattatgaaagacaatgcagaagtttttaaatccatggcagatgagatggcagatacgatcgttgagcataatgcaaaaggtgagaagactgtatttatctgtcctgtaggccctgtaggacagtatccttattttgttgacagagtcaacagcgagaaaatcagcctgaaaaatgtctggttcatcaatatggatgaatatctggatgataacaaagaatgggtgagcatcgatcatccgttaagtttcagaggctttatgaaacgtactgtttatgacaaaatcaatcctgaactggtgatgccggaagtacagagaatcttccctgatccaaagaatccgggtcacattccagaagtgatcgggcagcttggcggtgtggatatctgcttcggcggtatcggtatcaatggccatgttgctttcaatgaagcagacggaagtctcagcaatgaagaatttctggcacagcagacacgtgtcttaaagatcacgcctgaaacaagaacagccaatgcgattggtgattttaacggtgcccttgaggatatgccgcattactgcatcacaatcggtatcaatgaaatttcccatgcacgtaagatccgtctgggctgcttcagaaactggcatcgtgccgttgtaagacgtgctgtttatggtgaacagacatctgaattcccagtcagcttattacagaatcattcggatattaatctgaagattactgaatttgtagcaagccttacagattaatatgtttatcataggcggggcgttcagcaaatggaagtatgattccctgcatttacagcagtgttaaaacagacagaggcgataacaaaatgaaaacattaattaaaaatggacaggtttatatgaaccgccattttgagaagaaagatttattgttggatgatagaaagattgctgtgatcggagattttcttgagccggaagatgcagatacagcagtatatgatgcggaaggctgttatgtcacaccgggatttatcgatgtgcatacacatggtggttttggtgtggatgtcaatgcagccacacaggaagattacgagaaaatcggccatttctttgcaaaggaaggcaccacatcctggcattgctctatcttgacggatactgaagagcagacagactggtgcattaaagaagctgtgaagcattatgaaaccaatacagcagcaggacagccgcacggcaattgtgcggatctgatgggaatccatctggagggaccgttcctggcatcggagtacaaaggggcgatgccagaatatctgcttcgtacagcggatatgccgctgttaaagcactatcaggagacagcaggcggttttattcattacataactgtatcaccggaagttgcaggtattccggagcatgtcaaagatatcactgagatgggcatcaaagtggctatcggtcattccggtgcggattatgccacatcctggaaatgtatcgatgccggtgcagcagccgcaacccatacatttaatgcgatgcgcctgttccatcagcatgagccggccatcatgggtgcggttcttgaatcggatgtatactgcgaagctatttgcgatggccgacatcttcatccgggttctgtccgtttccttttgaaaatgaaggggtatgacagagtcattgccatcacagactccattatggctgcaggactgccggacggcaactacaaactgggagtcaacgatgtcattgttgaagaaggtgatgccaaactcaaagacggtacaagagccggcagtaccctgacaacgggacaggcattcagaaatctgatgaaattcaccggcgaaagccctgagaagattctaccattgctgacagagaacccggccaccatgttaggactgcagaacagcattggcttcatcagcgaaggcagagatgccgatgtgttgatcatggacagcgaattccagataaaagaaacattcgtcaaaggacgtcgaattatttagaaaatagagaggagttttaaaaatgccattaattccattaagacctttacttgaaactgttgataaatatcactatgcgcagggtgctttcaatgtcaacgctgttgctcaggcaaaagcggccattgaagtgcatgaaatgttccgttctgcagcaatcctgcagggtgcagatctggccaacggattcatgggcggccgtacagatttccagaatgcaactctggaagacaagaagatcggtgccaaaaatattgccaatgccgtcaagaaatatgctgaggattcacctattcctgttgttctgcatctggatcacggcaagaactttgattcctgtaaagcagccatcgaaggcggttatacatctgttatgatcgatggttcttcactgccgtttgatgaaaatgtagagctgacaagagaagttgttaaatatgcccatgaaagaggcgtttctgttgaaggtgagctgggtgtattagccggtgtggaagatcacgtattttctgcaacatcaacttacacaaacccattaaaagctgttgaattctttaagaagacaggcgtagatgcgctggctatctcttatggtacaatgcacggtgcgtctaaaggtaaaaatgttaaactgagaaaagaaatcgttattgccatcaaagagtgcatgatgcatgaaggtatctttggcgttttagtttctcatggttcttcaactgttccaaaatacattgttgatgagattaatgccctgggcggcaatattcagaatgcccatggtatttctgtagatgaactgaaagcagctattccttgcggtatcggcaagatcaatgttgatacagatatccgtctggctgttacaagaaacatgaaagaattcttccataactatccggagaaacgtaacagcccatccatcggcggcgtctataaactgcttgaagagaaaaaagatcagtttgaccctcgtgcattcctgcctccgatcatggataccgttatgtacggcaatattcctgatgaagatgttgctgctctggttgctgtcatcgaaaaaggtgttaaagaagctattggtacactgattgtacagtttggttcattcggtaaggcaccgcttgttgagcaggcaagtcttgatgaaatggctgaacgctataagaagatgtaattgcgtcaataatagaaggtaaagaaggaattgtacaacatggtctggctgattgttgcgacacttgctgctagttttattaagggtgtctgtggatttgccaatacccttgtatttaccacgatattgagtttttcgttcaataacattcaaattacgccgatggatctgattatcggctacccggccaatgtgatcattgcctggaaagagcgcaggcagattaactggcgaatcagtctgccggtggcaactctggtcattctcggcaacattcccggcatttttatgctgaagaatgtggacacgcgaaccatcaaagtgattttcggttttttcattatcgccatgggcattgagatgctgatgcgggagaaagcaggaaagaagcagaaacagtcaaaaatcatacttggactgattggtgtgctttcaggtctgtgctgcggactttatggtgtcggtgcactgctggcggcgtacatggatcgtgtgactgaggacagccatgcattcaaaggcaatctttgttttgtattctggattgaatgtacattcagactgattgtctatccatgcatcggcatattgaactggcagatctttcgtcaggcggtatgtatgattccgtttatggtgctggcgctgttttttggcatgaagtgctgcggacatttgaacgaaacggtcatcaagaggctggtcattatcgtgctgatattgtcaggaattgcacttgttatccaaaacctttgttaaaatatcctatgcccaatcacttttcattatacaaaaggtgtcggatgtgactgatttggtcacaaccgacaccttttttgtgcatattcaaccaaaatcggtcattatttttgtgaagtagtttgattgaatttgactgaatttggcgttataatatgaacataataaagagcaggaggtaacaagatgatttatacagtgacttttaatccatcactggattatatcgttgcagtagacgattttcagctgggacttaccaatcgaacaagttcagaattaatccttcctggaggaaaaggcattaatgtttcaacattattaatgaatcttggtatagaaagcacagcacttggttttatggccggtttcacaggtgatgagattgtccgtgagctgcaggaaatgggtgtgaaatctgatttcattcgtattgatgaaggcatttcaagaattaatctgaagttgaaatccattgatggcacagagatcaacggcagtggaccggcaatcagtgctgacaaagttgaacagctgatggttcagctggatgcacttggtgaaggcgatgttcttttcctggcaggcagtatcccatcatctatgccggatgatatgtatcgccgtattatggcaagactggaaggtaaaggcgtgatgatcgttgtggatgcaacaaaagatttattgctgaatgttttggagtaccatccatttttgatcaagccgaataatcatgagttgggtgatattttcggtgtagagttaaagacaagagaagaagttgttccttacggcaaaaagcttcaggaaatgggggcacgcaatgtgctgatctctatggccggcgaaggtgccgttctgatcgcagaagacggacaggtatttgataagcctgcaccgaagggccatctggtgaacgctgtaggcgcgggcgattctatggtcgcaggttttatggccggatggatggacaaacaggattatgagcatgccttctgtatgggtattgcatcaggaagtgccagtgcattttctgaatatctggctacaaagagcgaaattgaagcaatttataaacaggtaagagtggaggattaaaaaacatgagaattactgacttattggataagcagagtatttcccttaatggtgcgccgaaagataagaaagaggcgattgatcaggtcgtagatctgatggcaaaaagcggcaagatcaacgatgttgaagcttacagacagagagtttatgcaagagaagaagagagtacaaccggtatcggggaaggtattgccattcctcatggtaaatgcgatgctgttacaaaaccggggctggcagccatggttgtcaaagacggtgtggattttgattccctggatggtgaaccggtgcatctgatctttcttattgcagctccgaacacagaagataatattcatctggacgtattgagtaaattatcagttcttctgatggatgagcagtttacagcagatctgctgaatgccaaatctgtggatgaatttcttgaaattgtggataaggctgatgacgagaagagcgatattgatgaacgtctggcagataccggtgaagctgaaggtgcgcaggcaaaacttctggcagtaacagcctgcccgacaggtattgcgcatacgtatatggcggcagaaggccttgagaaggctgcaaaggcaaagaattgtttcatcaagattgagacaagaggatccggtggtgcaaagaacgtaatcaccgatcaggaaattgctgaagcagactgcattatcgttacagcggatactcaggtaccgttggatcgttttgacggtaagaaagtcattatccgacaggtgtccgatggtatcagcaaggcagatgaactggtagatctggcgctgtcaggcaatgtacctgtttaccatgcagctgaaggtgctaagacagaggttaaatcttccggcggcatcggccatcagatttatgcacagttgatgaatggtgtttcacatatgctgccatttgttatcggcggcggtatcctgatcgccattgcatttctgatcgatggtctttcaattgatatcaattcactgccggcggatcagagagccaacttcggtaccattacaccaatcgcagcgatgttcaaacagatcggcggtgttgcatttggctttatgcttccgatactggcaggatttatcgccatggccatcggcgacagaccggcacttgcccttggttttgtaggtggtatgatggctgcaaatggtaaatccggtttcctgggagctttggttgcaggttttgttgccggctatctgattcttgcactgagaaaagcttgtgataaactgccgacagcacttgagaagattgcaccggttctgatttatccggtggtgggtattctggtaatgggattctttatgatgttcattgtagagccgatcatgggtggtatcaatacaggtcttaacaatgccttgacaggtatgggaagttcaagtaaagtagtattaggattagttctcggcggcatgatggccatcgatatgggcggcccattcaataaggcggcttatgtgttcggtacagcagctattgcagcgggcaattatgatatcatggcagcagttatgatcggcggtatgacaccaccttgtgccattgctcttgcaacaatcctgtttaaggataaattcacaaaagaagaaagagagtccggtccgacaaactttatcatgggtctggcatttatctcagaaggcgccattccttatgcggcagctgatccgttacatgtcctgccatcctgtatcgcaggttcagccattgcaggcggaatttccatgttcttcggatgtacactgatggcacctcacggcggtatcttcgtattcccggttgtgggcaatgcattgatgtatctggttgcgctggttgtaggtacggcagtttctgcagtattacttggtttgttaaagaaaaaggttgcttaagttaaagattgaaataatcgaaataataaatgatgattgtcaataaagtcaacgaataatatgaattgaggaggaatttatcatgaaggaatttaagtatgtgatcacagacaaagaaggtatccacgctcgtccagccggtgaactgatcaaagttgttaaaggattcaacagcacgatcaagattgccaaagacggcaaagaagcagactgcaagagaatgttcgctgttatgggtcttggcgttaagaatggtcaggaagttgtctttacatttgatggtgaagatgaagatgctgcatgtgaagcagtcagcaaattcatgaaagaaaatctgtaatttataattattgtaacgacggcgttataaggagttaaacgtgttcccgtatcagcggggcgaattgaagagactgttgcatgatgggtgccctgtaatgggttatgcagcagttttttctttagcggaggagaatcaggatgcagatatataaaggtaaaagtgtttttggcggtattgccattggtaagatcagtgtttacaaaaaagatgaacagcttgttaagcgtgtcaaaattgaagatgcagatgcagaaatggagagatacacagatgcccgtaatattgcggctgcacagcttcagaagttgtatgataaagcgttaaaagaagtaggagaggctaacgctgctatttttgaagtgcatcagatgatgcttgaagatgaagattacaatgaatctgttgagaatattattcattcccagatggtgaatgcggaatatgcggttgcctccacagcagataattttgcccagatgtttgaggccatggacgatgattatatgcgcggccgtgcggcagatgtcagagatatttcagaacgtgtgatcactgttctggcaggcggtgcaggcagcggacttgattctgatgaacctgttatcattgcggcagacgatctggcaccatcagaaaccgttcagctggataaggataaggttttatccttcgttacagcccacggttcagagaattcccatacggctatccttgcacgtaccatgggtattccggcattgatcggtaccggtattgatctggatgagaccgttgacggcaagcttggtattgtagatggcaccaatggtgttgtttatgttgatccggatgctgaactgttggaagaaatgaagaagaaacagcaggaagagcaggagaaaaaacgtcttcttcagacattaaagggcaaagaaaatattacacttgacggtcagaaagtgatgctgtatgctaatgtaggtaatatcaaggatctcggtattgcgctgcagaatgatgcaggcggtatcggacttttcagaagtgaatttatttatctgggacaggatcattatccgacagaagaggaacagttccagatttataagactgtggcagagactatggccggaagaagagttatcatccgtacactggatatcggtgctgacaagcagtgcgattactttgaattggacaaagaggacaatcctgcaatggggctccgtgccatccgtatctgtctgacacgtccggagattttcaagacacagttgcgtgcgcttttcagagccagtgtttacggcaatatcaacattatgtatccgatgattatcagcgttgatgaggtccgtcagattaaagccattgttgaagaagtgaaggccgaactggcagaacagggaattgaatacggcaatccggcacaggggatcatgatcgagacaccggcctctgtgatgatgagccgggaattggcagaagaagtagatttcttcagtatcggtactaatgacctgacacagtatacactggccattgaccgtcagaattcaaaacttgacaagttctttgattcccaccatccagcagtccttcgtatgattcagatgaccgttgagaatgctcacaaggcaggtatctggtgtggtatctgcggtgaattgggcgctgatcaggctttgacaaaggattttctggcgatgggtgtcgatgagctttctgtatctccgggaagtattcttccacttcgtaagattatccttgagaccgatgtcgaagcgtataagaagtcaaaacagacaaaataatacaagattgaatcgacataaacagatgaaggatgtctctcatttgcaaatgaagattaaaataggcaacagattaattcagactgcgtcaccatcaggtggcgctgtctttgcagagtagaagaagtaactgcgagggcacaacgcagctgcaagaagaggaaattatgctgacagagcaacgatatgaaacaattttacgaatgttggatgaaagaggaagtgtgacggtcacagaactgaaagacctgctggatgcttcggaatctacggtgcgccgtgatatcacagctcttggcaaagccggccgtctgatcaaggtttttggcggcgccgttgcgatggagcatattatgacaggcagcgaaccgacagtggctcagaaggtagaagtgaataaggaagaaaagtgtcggatcgcgtcttatgcagccagactgatcgaaccggaagactttattttcctggatgccggtaccacaacgggatacatgctggattatctggaggagaaaaacgctacatttgtcaccaatgcagtggcgcatgcccagaagctggccgagatggggatgaaagtgctgttggtaggcggtgagctgaagagttccacagaagcgattgtcgggggacaggcgacggagatgatccgtcggtatcatttcacgaagggatttttcggtaccaacggtgtgacgaagaaaacgggatttaccacaccggaagccagtgaagcggttgtcaaagaaatcgctatggctcgttgccgcgaccgatatgttcttgcggatcatgacaaattcggcaaagtcagttccgtaacctttggagcttttcaatcggcaattatcctgacggatcgcaaagttccgggaattgaggacgtcgggaatgtgattgtggtataaagagaatgaaatattgctggcacggagtatcagaaaaataaattatgataaataaaaatccacttttgtagaaaagtctatgaaagtggatttatttttcaaaagtgaaaaaagatcgatgttctatgatataataaatccattggatcaattttaaggaggacaatttctgaatgaaaaagagaattttggcggttgtgatgacagcggctatggtgctgggagcgcttacaggatgtggtcagtcttctaaggatgataagacagaatcagccacagcagcagaaacagaaactatcagctatgatgtactgacccaggtgcgtgtaggttatatgccgaattatgaatctctctgggaagtggccacagcgattaataaaggttattttgaagaacaggggctggatatcaagttatcttcttttcaggttgacgaggcgggaatagggttaatggcatcagggtctgttgatgtggcttatatcggagcggatgtgcataagcggtgtattgaaggcgcggcgcagattttctgcagcagcttgaaggtttccggtgagactgccgattgccagggctgggtatgcctgccgggttatgtggaggccaacaaggacatccttgtgagatttacaaaggcgctttataaggctatggattatggctcacaggaagccaactatgatgaagtggccggttatgttgcggatatctgcggtacagataaagcaactgaattggaacaggcaaaagaaggcaactggattgacagcaagacacttcttcagtatctgggagacggtacattgaagaaatactatgaaagccagcagaagaatttcatcgatgctggtgatgtagataagaaagtaccgattgaagattatgtactgtttgatgtgatggaagaagccggcaaatagtgttttataactttataaatgagtgaagaaagagatgaacaaatcggaaatggatgcgtttgtctctttttttgtggaaattaaatgtgtaaaattgaatacataatacaaaatactaatgtttgtattgaatactgtatacaatcatggtataatcaaattacaaaagagataaaacattatttgacataaggaggtaccattatgggtagagagattaatcagagaaaagcagcgattattggttgtggttttgttggttcagcaacagcatttacattaatgcagagtcagcttttttcagaacttgttttggtagatgtagattttgacaaggcagacggagaagcaaaagatattgctcatggtattccttttgcaggtcagatgaaaatacatgcaggggtctatgaagatttgagtgatgcggctattattattgtgactgccggagccggtcagaagccgggagagacaagattggatttggtgcataagaatgtggcgatttatgaaagtattattccgagaattgcagaacagaataaggatgcgatattactgattgtttccaatccggtagatattctgacttatacagctttgaaattcagcggctatcctgagaatcgtgtacttggttcaggaacggttctggatacagcacgattaaaatatgctcttggtgagcatttgagtgtagacagccggagtgtccattctttcattatcggtgaacatggtgacagtgagattgccgtatggagcagtgccaatgtggcaggtgtgccgttagaccagttctgcgagatgagaggccactataatcatgagacagctatgaaggaaattgcagaatctgttaaaaacagcgcttacgagattattgccaagaagcatgccacttattatggcattgcaatgtctgtaaaacgtatctgcgagtgcattatgcgcaatgaaaagtctgttatgccggtatcttcaatgatgcatggtgagtatggcattgagggaatgtgtctgagcatgccggctgttgtcagcagtgagggtgtagagactcatgtgccgattactatgaacgaagaggaaacaaagaaactgcaggaatcagcagcaacattgaaagagattattgaggatattaaactgtaaaaatcttagatggcataaggaataatgagtaaatgagccgggagaacacaattttgtgaagctcccggcttttctattaatgataatatacgcatatgcgtaaagtaaaacaagataatatggaaagataatgcaaaccagaaatttactgtggaatatccgttaccagtgcatcgatatcagcagcctttgtgatgatgcccatcttcagcagccagtcagctgtattctgccagctttctttgttgatagtcaggaagtcagcgctgttgtcagccatcagaggaagaaggatttccatactcttttcttcaacttctgaatccagaggatagttggctttgtcctggttgttcagaagaatctgcaggcagccctgtggatcatcgaggacatcctggaagccttttctggaagcgcggatgaagcgggccagtttgtcactttcgtttttgacctgattttcaccggtgacaaggacaagttcttcataatccggacagccttcttttgtaatatcgaaataagtcacgtcgtagccctctttctgaagagctggatattcgtggttaatataggtaccgatgacagcgtctacattgccactgatcagggatgtattcaggtcgaagcccacatcctgcatcgtcacatcgtcataggagagtccattgtgttccatcatcgctttgacaaaatattcattgtcgacagtgcccggatagccgataattttgcctttcaggtctttggcacaggtaatgttgctggatttcatagacatgacaatgttcagcggatgctgcacaatcgtaccgagaattctgacaggaacatcctgatttgttgcagtagagatgatgtttggctggtagtagagaccggcatccgcctgtccggccgctgtcatcgtgatggcatcatttgtattggccgggaactgtacatgtacattcagtccttcttccgcatagtatcctttttcaatggcagtgtagataaaggaatgcaccgcattcggataccagtcaaggacaatgctgaaatcttcaaggtcaccgttggatgctgtgctttcagcagcttctgaagatgctgtgtcagtctgtgtttcagcagtactttctgaagcatttgaagcagcctcagtagtggatgtgcctgcggaagaattgccgcaggcagccatggaaagcgtcatagcagcagtcagtaaaagtgcagaaaattttttcatctttttcataatatacccctttttttattagtgatcgctcagaattgacatctaagccactgaattattgttcttctttcataatacccagcatagctgcaaaaagtgcggttttctcggtaattgttggaatatagaccttttcctcggttgtgtgcatgccggattccacaggaccgaatgcgtcaacggccggcacaccgaaggaatagaaccagttggcatctgttgctgtcggttcggcaatttcttccatggtaataccgaggagctgacctgctttttcagcaatctggaaagctttgtggcccatttcgttcttctcaagggcagggaacagaatacggtgtgaaacagttgtttcacatacaggatcttcgttggaagcggccagagattcgatattggcttcggcttcggcaaaggagggaccattgtcaggaagacctgctacacagaattccatatgggcatcaccggcaacgataccattcggacgcccgccggagattggcgctacattatagtagatctctctgtcatagtcattgaagctgtacagcttgagaatcttatgcgccagttctttgacggcactgtgtcctgccatataagcaccgcctgcatgggcttcaacacccttgatatccagagcacccaggataacacctttacgctggctgacaacaccgtaacctttgtctgttttggcagcgctctcgaagatgtaagcacattctgtaccaggtgcttctttctcgaagaccttgcggctggtaatggaaccgatttcttcatcgcagctgtagagcataacgatttctttgtttggcagtaagcctaattcgctggcgatcttgacagcataggcagaaacggcgaatccggctttgcagtcaccgcttcccaggccgtggagccaattgtcttcatcgacataaggcgggaatttggcagcatagccaacagggaagacggtatccatatgcgaattcaggatgatcttgccttccggatgttccggtttgatgcgggcaatcagatgggtgccgcatccttcaaagaacatttcttccattgtcacaccggggatggtttcaaggacagcccgggccatatcaatgacctgcctattgccttccacataattcgactcactgtcaacggaggtgaagcgcatcagcaaatctacctgctcctgcagataaccttctgctaattctttgattttgttgatatccatttgtaaaactcctttcatagagggtgttgttctaaaggtgttcgatcattgtatttacagttcttttcgccatgggatcgcaattctttctataataccgacaatcgcgacaatcaacatagccactgcggataataagacaatcggggcgaagacaccggcaccatccagctgtgtcagcatacgtttgctgaaataaccaagaccgctttgtgcacctagccattctccgatggccgcaccgatgatactgatcggaattgccattttgatggctgagaagaaataaggcagtgcattcggcagtttcaatttcatgaaaatatccattttgctggcattgaaactgagcatcaattcctccatttcacgtttcgtggactgaaaaccgtcataaaccgtgatggtgatcgggaaaaaggtcatcagtactgttaccagaactttgctccagatggaatagccgaaccagagaacaaacagcggcgcaatggctgttgtcgggatcgtctgggaggcgatgaccagcggataaagggtacggcggatgccttcatgcatgtccatggcgatggccaatgccagacccaggacgacggagatgccaagaccgatgaaggtaacggacatggtagccggcagatgcaccatgaacagcggttcacgcagttcccataacttctggataacctggatcggtgtcggaagaatataggcggcattgatgccaagtgccaatgcttgccagccgattaaaagaagaaagaagagaatcagcggcggtaaatattttctcatataatcacctgctttctcaactgatcgatcagatattcttttaattcgacaatctccggtcgtcccatatcattgcggtttctaggataatccatgggaactttcagaacttccagctcatggatcggtgtctgcttgaccagataaattttgctggacataaagatggcttcttctacatcatgggtgatgaacataattgttttgtggaaatgctgccattgcttcagcagccattcctgcatgctgattcgggttaatgcatccaatgcactgaagggctcatctaagagcagaagatcagcatctgttaaaagtgttcgggcaaaagagatacgctgacgcataccgccggataaatcctttggatacttggcggcataatcagaaagtccgacttccttcagaatatcagaaacacgctgtgtctgttctgactgaggaactttggcaatttccatgggaaggcatagattcttctcaatggtgcgccatggaaagagcagatccttctggggcatatagccggcagcatgtttcacggaagcaatatcctgcccgttcagaaggatattgccgcttttccttttcaaaaggccgttggtcagtttgaagatcgtactctttccgcagccgctgataccgataatggaaataaactcctcgggttccacggtaaaggaaagatcgtcaatgatattgaaatcttcgctgtcatattgaaaggtgacatgttgaaattctaacattttagaatactccttggtaaaagttttgcgtgcggtctaaagcgtcatattccaggccatatcccagaaaaatgcttcatagcggctgcatgtcctgaagatatctttgaggtgggcgatatctgcttcagaacaatgttcaccgagacgatcgacggtgtccaggatgctctggttgcaggccacatattcttcagaaacatagcctttgatccagtcaccgtagaatggatggtcagcggctcccggaatctgattcagtgcttctccgatcatctgatagctccatgagcaggagagaatggaaacaagcagttccagaatgccttcattgtgtccgacttccagcatatagtgggtataggaagtgttcatgatagaaggcttcacattcgctacttcttccggggtaatgccaaggcgggccatatagccgcgatggatgtccatctcaccgtttaatgtgtcgttcacaagctgtgagaagaactgcatcatctccggttcacgggacttgacgatacccagggcataaactctggcatagtcatagagataaagatagtcctggagcatataaaaacgaaaacgttccagggaaagggagccgtcaccgatgccggagacaaaaggatgcttcagatagtcgtcccagatctctttgacgtcttcgtataagatttctgttaatttcataaatttcctccttaaaggtttaacgagataattgcgaaacagaaagtttttggggcctgcatcaatgcataagtcaacgcaggcacacttgcgttgcccaatgctggcaacggtacataaagtggtaaaagacaccacttaagtaccggccgcattggaagcacctgtgttaacttatgcattgatgcaggcacttctcaaagctggtgttagtttcgcaattatcatcaagtgcttagaaatggtatgttatgaaacatttgatgagtggttatcagctgctaaaaaataaaaggagctctgctaagaaatgaagcaggactcccgattaggtacatgtgtattcattacttatggttgcttataaaaagataattgaggcaatcaatcatcatagcatataaccataaatagttcatttacattgctttcctgcgttgggattatccacatcaagttcaaagggtcggcacaggcctctcagcagttaagcacccctagcaaattcagttttattatacagtatttgtatacaaaagtaaataaaaaaatgaattgataaagaaagttattgtctgtttgcgaattttgttttatactttgcgttatgagtaggttaaggagaaatagatcaaagtaatataacatcaagcaaggcttgaatattagagaggaattgacagaatgaatcttgattactacaaaaccttttattatgtggctttgagtaagaattttacgaaagctgcagagcttcttggcaataatcagcctaatgtaacccgttcgatgaataatctggaggcggagcttggatgccggctatttgcgagaagcaacagaggggtatcgttgacaccgattggagaagaactatttcagtatgtgtcagcagccatgaataatctggaacagggagaggaggagattaagaagacgctgaatattgagaatgggcttgtgactataggaagtagtgagacggctttaaggttaatgcttttggagcgattaggcagttttcatgaagaacatccgaaaatccattttcgaatttccagttattctacaccgcagactatacaggcactaaaagagggcaaaattgattttgctgtgatttccacaccggtggacataaagaaaccgcttcataaaacaccgctgatgacttttcaggatgttttaatcggcggctcgaagtacagagagctggcatcgaagacgcgcagtctcaatgaattgatgagctatccatttgtctcacttcccccggagactgggacaagaatgttttatacacagtattttatgaatcagcatttatcttttcatccggagattgaggtggcagccacagaccagattcgtctgatggttcgctataatctgggtatcggtttttgcccggatgacctggcagcagattacattgcaaggggagaggtgtgccagatccatcttcaggaagaaatcccaaaacgccagatttgtctggtgacggatgaatcaaaggtattaagctctgcagcccggaagctgagagatgcactggcagcggatgccagctacaggccttttttctgtgattgctgaagcgaaagaacgtgtataaaaagaaagagtatatagctattgaagagacagccgccggttaaatacggatcttgccggctgtctgtcttgatgttttcaaacgagccatggctctggccagtgaagcgctggaatggtagtattcctgaatactctgtttctgacgcagctgttccagagccctttctttggcttcttcggcacggcgaacatcgatttcttccggtttttctgcactttctgtcagcaaaatgacacggttgttggctatctggacgaagccgcggccaacataaccgatatgccaggtaccatcttccgttttataacgcatttctccgtccgtgacggcaataaccatggattcatggtgggctaaaacctctttctcaccgtcaaaagcgggaacgatcagagagaggcagggaccttcatagaagaccctgtctgctgcgatgattcgcagattatacatatcactcattagaaacgcctgcctttctatttgacagaagcctgcattttttcagctgcacgtttcacatcatcgatggtgcccacgttaaagaacgcattttcagggtaatcatccatttcaccgctgataatggctttaaaaccacgaatggtttcttcaataggtacataaacacctttgatgcctgtgaagttttctgccacgtggaatggctgagaaaggaatttctggattttacgggcacgataaacggtaatcttatcttcatcggacaattcttccatacccaggatagcgatgatatcctgaagatctttgtagctctgaagaatttcctgtacctttctggcaacttcataatgttcctcaccgacgatatccggttcaagaattcgtgaggaggattcaagaggatcgacggccggataaatgccctgttctacaatttttcttgaaagaacagttgtggcatccagatgggcaaatgttgttgcaggagcagggtctgttaagtcatcggcaggtacataaacggcctgtacagatgtaacagcgccattttttgttgaagcgattctttcctgaagttcacccatttcagtagccaatgtcggctgataaccaacggcagaaggcatacggccaagcagcgcagacacctcggaacctgcctgagagaaacggaagatattatcgatgaacagaaggacatttcggtgctcctgatcacggaaatattcagccattgtcagaccagtttcagcgacacgcattctggccccaggcggttcattcatctgaccaaacaccagggctgttttttcaagaacacctgaagctttcatttcggaccaaaggtcgttgccttcacgggaacgttcaccaacaccggtgaagatagagtagccaccctgttcagctgcgatattacggatcagctcctggataaggactgttttaccaacaccggcaccgccgaacagaccgattttaccgcctctggcatatggtgccagaagatcgataactttgatacctgtttcaagcacttcagctacaggattctgatcttcgaaagcaggaggatctctgtgaatagaccatttctccacatcttttaattcttcgccgccatcaatggtttcacctgtgacattgaaaagacggccaagagtctgttcgccgacaggaactttgataccaccgccgggagcaataacttccatatcacggtaaagaccttcactggcggagagcataacacagcggactgtgtgattaccgatatgctgtgaaacttccatgatacatttctggccattattatcaacttcaagggcatccttgatatatggaagatcatcatcttcgaattctacatcgacaacaggtcccatgacctgtacaatttttccttttttcatatcggacacctccttttaattttttccttttttctgagccttggcaccggcaatgacttcagtgatttcctgagtaatagcggcctgtcgggctctgttataaagtgttccaagctcctgaagaatagcagatgcgttatcagcggcagcctgcatcgccatcagacgggcattctgctcactggcataagcttctacaagggcactgtaaatataaccgacgatataatccggtacgatctgtcccatgacggcttccggtgacggtttcatggcgatgtgttccatcggaagatcgacggggatatctttgatcatgaaatccggacgttcaaggggaagaagacgcatgaactgtgcttcttctgtcatggcatttttcatgcttgtgtagatcagatagatttcatctaccttttttgtacgataagcatcgatcagtgtctcagaaatatttctggcacggcttaatgtcggattctgaatggtatagtggaactggtgggcaatcggtatttttttctgttggaaataatgtctgccgatttcaccaatgacatataattttgcgtttttatcgttttgaatatgctcttcagccagcttgaggatattgtggttgtaggcaccggccatacctttatccgcagtgacgaccacataggcacggcgaattgtattctcatctatggcagcattcggatcacggaagtattctgaatgcatttcaggaagatgacgaaggattcggctcatggtggactgaagggtatagaaatacggctctgtattcgctaacgctttttttgctcttctcagtttcgacgaggaaatcatatacatggcattggtgattttcatcgtgtcctgtatacttctcattctgtctctgatttctctggcatttgccatatcagatacgcctccttcctgtcttactgctgtttgaaggcttcagcggcttcatcaatctgctttttcagttcatctgtcagctgaccacctgtctgaatggcttcacatatatctgcatgctgcagatcgaaccatgccagaaggtcattctggaatttcttgacagatttgagctccacatcatcaaagtaacctttgttagccagatgaagggtaataacctgctggttcagctgaagcggtttaccgagcggctgcttcaaaagctcaagaagggcatggccgtgttttaactgttgctttgtaatatcatccagatcagatgcgaactgggtgaaaacttccatctcacgatactgcgccagatcgatacggatactgccggaagctttcttcatagcgcttgtctgagcagcaccgccgacacgggatacagacagaccaacgctgacagcaggacgcatacctgagaaaaacagatggctttcaaggaaaatctgaccatctgtaatggaaataacattggttggaatataagcggataagtcaccggcctgtgtctcaataatagggagggctgttaatgatccgccgccaagtttttcactgagtctgctggcacgttccagaagacgggaatgcagatagaacacatcaccgggataagcttcacgtccgggagaacgctccagcaaaagggagatggctctgtatgcaacggcatgtttgctcagatcatcatagacgatcagggcatcctgtcctttgtacataaagtattctgccagcgctgtacctgcgtatggtgcgatgtactgaagagaagaggagtcgctggccatggaagccaggacgatggtatattccatggcaccatgtttttccaggttgttgacaactcttgcaacggtagaagctttctgaccgatggcaacgtacacacaaacaacgcctttgcctttctggttgatgattgtatcttctgcaatagaagttttacctgtctgacggtcaccgatgatcaattcacgctgaccacggccgattgggaacatggagtcaatggaaaggatacctgtttccaatggtgtatcaacaggctgacgatcaatgatcgccggtgccggttcctcgatggcacgatattcagtggaagcaatatcacctttgccatcgataggttcacccagggcgttgacaactcttcctttaaaggcatcaccgacgggaatgccggctcttttgcctgtacggatgaccttgcagccttcacgaatggattcgtcgtggccaaaaaggatacaaccgatttcatttcgacggatattctgtaccatacctttgacgccgccatcgaagacaacgatttcgccgtacatcgcatggtcgataccgtaaactgtggcaataccatcgccgacccagatgacttcaccggtctctttggcttcattgtcccagtcgtaattttctatttcattttttataatcgatataatatcgtctgcactaatgacactcacattatcacctctttcagagttttaaatctgtccaacggcatccttcagctgacggatgcgtgctgcaaatgtccaatcgtattcttcgttgccgatacggatgcgcacaccgcccaggagagaaggatttatgctgatttgataaatcagttctttgccgggatacttccgtgagaggaaagcttttatttcattttctttttcaggggatggtgtttcggcaaaaacacattcaacctgtacacggttatgagaagtatcccagattttctgccattcagcatagatgtctgccagttcttcaattccgccgtcattgcacatgaccttgtaaaagttgatcagatggcgggggagaccggagccgtcgaagacgcgttcaatcagatgatgttttttctcagatgtcacaaggggactccgaagaacgttcaaaagtgcaggaactttttctgtgatctcacgggcagtctgaagttcttcagacgtaatacccagctcatacagaaccattgcattatttaccgctctttgcgtcatactgatcacctgtcataataattttctttgcagccagcatggcaatatccatgatctgtgactgcagttctttcttggcatttgcctgttctttttcaatatcttcacgggcctgagccagcattttgactctttcagcctctgtatcagcaattgccttgctgtgttctttttcggaacgtacacgggcagctgcgataatatcggcggcctgttctttagcagtgtcaagctgctgctcatagtcggttttcattttgttggcttcatcctgcgttttctgtgcagcatcaaattgctgcctgatcatttcgtttcgctgctcgatcacacccataaccggcttgatcagaaaatgccgaagtgcaacaaaaaggacaaggacattgacgacggtccagaagattgtccagggttccaaacttaacatagctgcacctgcctctcattcttactgttccataagttctattaaatatcgcaataattatttcaggaaaagaatgatcaacagggcaataacgaaaccgtaaatagccgttgcttcggcaagggcacaaccaagaagcaaagatttactgattttgctttctgcttcaggctgtcttgcgatagcgtctactgcggaagaagttgctttaccgataccaacaccggcaccaatacctgttaatactgcaatacctgcaccaattgctacgaataatgttgctgacataataactcgctccttttcttttaaaattgacggatcattgaggatcagtcgatagcttctttaataaataatgcggtcaggaatacaaaaacgtatgcctggatcagcccgtcgaatatatcgaagtagcagctgaataccgccggcaggatggccgggacgaccatcttcagcaattccataatgacaaacgagccaagaacgttgccgaataatcgcatacataatgaaagtggtctgatgaaaatctcaaggatgttgatcggtaaaatgacaaccatcggttctgcgaagcttttcagccagccgcggccgcctttagccaaaacaccagacagctcaatcaaaatgatgctgagaattgccagtgaagccgttacattgatatcctttgtcggtggtttgaaaccgagaatgccgatgagattggcaataccgatataaattcccacactcattaaataaggaataaaacgtttgcctttctcgccaaggatatcttcgaagaagctataaataccactgacagccgtttcaagaagcagctgtcctttacctgggtttgtgaccttcaggtttctgacaaaaatcgcacacaggagaatcacaacagccatgattaaccatgttacaaaaactgattcagccaccggtatgccgccgaaaatcggaatcgtaaaagctgtatcacagtttaattcttccatgagattttttaccagctcatccatatttattcacttccttttcacttccctctcgggctgttcacaattttagtctcgtcaaaggcaattgtcaaatgtcgaaaaaataatgaaaattcacaaattgaacacagctttgtggatattatgccctaaaagtgtgtttaagttgtatttgaaactggtaaaatttgattaacggtctgtagaagagaattaattttctctcatttgacgtatgttagaattatgaaactttatggaatataatcatgatacatctttgatatgtcagaattgtttgaagaatagtagacaaataagaaaagtgtgtcggaaatcttacacacttttctgtaaaaaataaaaaatatggtaactgttcagagccagcctccaaaatgctacgcatttcgtcggtgtggcgtatccgccaaataaaatttcaaaaacttacagaacagaaatggtgtctcctatatggatggttccttctttgatgactttggtaaaaattccctgggtaggcatgatgcacttgcctactttctgctgaatggcacatcctttgtggcattccttgccaatctgggtaacttcctgaatggtttcaccaatctgaagacgagtgcccacaggcagttcatagagacagatgtcctttgttgtcagattctctgcaaattgccccggcgtcaggtcttcaacacccatttcagtcatgatgtcgatactctcctgagccagaaggctgatctggcggtgccagttgccggcgtgggcgtccccgacaatgccgtgatcgcatttgcagatggcagtgtcaacaggggttttaaccacacctttttctttggatatgttaatagatgtaatagtgcctttgatcatatgttgataacctcgttttcgttgattaggtatattttactgtaactgttcagagctaacctccaaaatgctacgtatttcgtcggtgtggcgtatccgccaaataaaattaaaaaaacagtcttaaaaatgcaagcattttatacctgttttatgaaattttgcttggctctgaacagttacattttacttttatttgcacaaagaagctaaatgtccggtgatatgcggagggttactgctgtgtgaaatggccggatttgccgccgtctttctcgatcacccgcagatttgtgatatgcatgccacggtctatagctttgcacatgtcataaatggtcagtgcagcagctgaaacggcatgcagggcttccatttccacgccggtctggccggttgttttgacggaggccttgatgtggacggcattttcctctgtgtcggtctcaaaatggatatcaatgcctgacagcatcagaggatggcacatcgggatgattgcagatgtctgtttggcagccataatgccggctacctgggcgacagccagtacatcgcctttcttgatctgtccgtcgatgatagcctgtaaggtctccggctgcatataaatactgccggcggccacagcgattcgatgcgtgatggctttctcggagacatccaccattcgggcacgtccctggtcattgatatgtgtaagaggcataaaaaccttctcccttcaatagatatgttgaaattcgatagctgcaatatagaccattatagctgaaatgagaagaaaaatcaaaaaatttcataaactttagcgcaatggtattgattttataaaagggacgctttaaaataggaagatgcgggataagatgtcttgtcaacaggacagaatcctgtatgtttttgacgttgacagaagataattgatagatgaagaaggaggcatgccttatggcaaagatcgatattatttccggtttccttggagcaggaaagacaacactgattaagaagcttcttagcgaagcattaaagggacagcaggttgtcctgattgagaatgaatttggtgaaatcggcattgacggcggatttttaaaggatgcaggtgtgaacatcacagagatgaactccggttgtatctgctgctcactggttggtgattttggtacagcgctgaaggatgtgatcacgaagtttaatcctgacaggatcatcattgaaccgtcaggtgtcggcaagttatcagatgttatcaaagccgttcagggtgtggcagaagatgcaccgattgaactgaacagccttgtaacagttgcagatgccaacaagtgcaagatgtatatgaagaacttcggtgagttctacaacaaccaggttgagagcgcacacaccatcgtgctcagtcgtacccagaatatgaagcaggacaagttggaagcctgtgttgctatgatcagagaacacaacaaggacgcggcagtgatcacaacaccttgggatgaactgacaggtgaacagcttttagcggctatggagaaaccagtgtctctggctgatatggtgatggctgaagaggatatctgccctgtatgcggcggccaccatgatcacgaccatgatgatcacgatcatgagcatgaacatgaacaccatcatgaccacgatgaccacgatcatgaacatgaacaccatcatgaccacgatgaccacgatcatgagcatgaacatcatcatgatcacgatgaccacgatcatgaacatgaacatcatcacgaccatgatcatgacgatcattgcggatgcggtcatgaccacgatcatgatcaccatcaccaccatcacgcagatgaagtcttcacaagctggggcaaagagacacctcgtaagtatacaaaggaagaagtggagacaattctgaaggcgctttccgctgacaacaatgaatacggtattatccttcgtgcaaagggtatgctgccaagccaggacggtacatggatctacttcgatatggttcctgaagaatacgagatccgtgaaggccagccggaatatacaggccgtctttgtgtcatcggctccaagattgatgaagctaagcttgagaagctgtttatgctgtaagtgtacatgaaataacatataagatgaatagcataaaaataaaagaccgatattccaggaagatagattcctggaatatcggtctttttatcgatgtatggtaatatgcgagatttgcaaagcatgttctattttggttataaagaactgcagtaacaatgcttttataattggttggtcatgagctgtgcatgttccatcatggcatcaaaagcagccgaatgattacctttacagattgcatccagaattttttcatggcaggcatagacatcttgacgaggtactttttcattgagctgcagttcaggatgatttaaaaatcccatgcctgaagattttaagctggaaaaataaggatcttgaagagagtcaatcagttctatgtgaaattgacgatccagtgcaaaatattcgccgaaatctgtctgttcatcaagataggctttcatatcctgcataatatatttcaatctgcgtacataaatatttttgggatttttggcgtaggctttggcgagttcggccacgcaataaccttcaatggcgttactgaaatggtagtgctgcttgacttcatcagcggttggcatatgaagttgaataccgcggcttggcagaatgtcaatgcgcttttcatcggctaatttctgaatagcatctcgtaccggtgtcttagacatgttcaattctatagcaatttgattcagggaatattttttatcatattcgaattttccatcgtcaatcatttggactaactgttcataggcttcatctttaagaaaaagtgacataggaatagcctccttaattatacatactgtgtttattataaacgaaatggcagagagtttcaacgtgattgaagtgttttggaaattcatcgttatattgtacaaaaacatctacaacctattagcagttatgttaattgacatagttataacaataaagtaatataccattataccgatatatcggtataatggtatatcgaaagaatataaccaggaaaaacaaaatcataaagtaggggagaaagcgtatggcactgaattatctttacaaaatgacatctacaaaaattaaggaattacagccaaaatgcaatcttgcatttattccattgggaccgacggaagtgcatggtccgcatctgccattgatgacagattttcgcagcggattggaattgtgcgaaagagcagcaaaaaagctgcaggaagaggggattgaatctatcattgcaacgccggtgacgtactgtgcagcagatgtgacaaatgtatttcctggaaatacatctcttagggtggagactgtcgagatgctgttagaggatatatgtctcagcttggcaaggagtggcttttataatatcatggttgtatctggacatgctgacccgggtaatgctgcggcagttgtcagaggtattgagaatgcgaaaaagaaaaacaacaaggtcaatggtacctattcggcgtggtttgacaaaggcgttgttgaaggtggcgcagcagcatattttaatggtattcatccaacatatgacctccatgcaggtgaatcagaaacaggatttggtttgatgcgttatccggaattactggataaagcgcagatcgcatcattgaagccgaattatgaaggcgagttcctttttgagagaattggtgcgggggcaaaagattttattgaatgtggtgcaccggatgcttattttggtgatccggcagctgcgacagctgaaaatgcggacaaacagtatgatgtattttctgattatgtggtggatgaagtgcgtgctttattgggataacagtagagaaggatggggggatgtctattatgaatgaaaagaaatttggcagaattcttgaaacaggtatggggtttatcatgtcatgggtcctgaatacatcggcaatgtatttattaggagctccaatgacaccggctacggtatttcctgcctgggtgggggcctttgctattgcggtagccattaactattttgcaccggtgatggattgggtggcatcatggacaaaaagaattaagaataaaacattggaatatgttgtaagagtgttgattttctcatttattgaaattctgttcaatagtgtatggtgtatgtacaattcggggaacattgtatattggccggcgaagtttccaatccttttggcggtaggaacaattgctatttttatttctttgccaattatggtacgggtagccactgcctgtgcgaagaaataaaatcagactgtaaaatatttgaatttatccgggaaagccgaattggcaggcaaatgattttgctcactgattcggcttttggtattttattgttggttaaaatggggggcgggttttgcagttagcgttgcagcagcccttttcgacttgaatttcatagatttatttgatatgataatgaatagcaaaagaaatacgaataaatagaaagtttggtgatagagatggataaactggaagtaccggtatacctgataacaggtttccttgagagcggtaagacttctttccttcaggaaatctttgaaagtggtgaatttgcggatggtgagagagggcttttgatctcttgtgaggaaggcgaagtggaacttgatgagaaggcaacactggcctgcaagattgatactgtaacactggatgaggaagaggaactgacggcagattttcttgagaactgcaagaatgtttacaaaccgaagcgggtttttgtggaatacaacggcatgtgggacccggatacaattctcagcgtggatatgccaagaggatgggagatttatcagattgtgactatgatcgatgcaagtacctttgctgtttatctgaataacatgaagtccattattggtaatatgatcaagtgtacagagctggttatcttcaacagatgttctgaagaacaggatctgccgatgttcagaagaaatctgaaggctttgaattccaatgtccagatgatgtttgagcacaaggacggccgaatgatcgaactgggcaaggatatcccgccatatgatctgaatgcaccgatcattgacattacagatgatgattacggcatctggtatatggatgcagcagatgacaaggatcgctatgaaggcaagaccgttcgctttacagcaaggatcatgaagaaccgtaagttgccgaagaatttctgtgtaccaggccgtaaagccatgacatgctgtgcggaggatatccgctttatcggttttttgtgtaaataccctgaacttgataatttaaagaatggtgattgggtgacactgacagccaatatgcattatgaacgcagaagagaatacggcggtgtaggtcctgtgctttatgcaacagaggttgtagaatgcgcagcaccggaagatgaattagtttattttaattaacagagtaaagggactgcatgcatgcggttcctttatcttaagcagaataccctttggcatgtcttcaaatgcgtgcctgaagggggggagaaggtgtggctattaatatggaagaaaaaattgttttctgcaaaggcggcggatgtaccgccaagctcggtgcgggggttctgagccgtgtactggaaaaacttccaaggggtgaacaggatccatctctgcttgtggggtatgacagcagggatgatgctgcggtatacaagatttccgatgatacggccattgtgcagacattggatttctttccaccgatggtggatgatccttatacattcggacagattgctgctgccaatgcgctcagcgatatttatgccatgggcggggaggtcaagacagcgctgaatattgtctgcttccctgagaagatggatttgaatattctgggtgagattatgagaggcggttcagagaaggtcatagaagccggtggcacattggccggaggtcattctatcgcagacagcgatgtgaaatacggcttgtctgttatgggagtgattcatccggacagagtattggccaataatcagggtcagcccggggataagctgattttgactaagaagctgggtgttggcattatctgtacggctaaccgggttggcgaagcatctgaggcagccatgcatgaagctatcaggtccatgacgaccttgaacaaatatgcgtcggagatttgcagaaaatacgatgtgcatgcctgtacagatgtcaccgggttcagttttctggggcacctgcatgaaatgttggacggcaagttgaactgttgtatcgacgcttcagaagtaccggtcattgaagaggcccatcgtcatgcgaacgaatttctactgacagcggccggtcagcgcaacagaaatcacacaggcccatttgtcgagttcagaaatattccattttctatggaagaaatcctgttcgacccgcagacatcaggaggccttctggctgcagtcaaagccgaacaggccgaggcactggaagctgaattacaaaatgcaggtcttccggcgaagattgtcggaacattgttggaaaagaatagtgaggcgcctgaaatagttgtagaataaatcatcaggccaatatgagctgatcaaggaggaagctattatgttaaaagtcattaatgccatgggtgatgcatgcccgatccctgttgttaagacaaaaaatgccattaaagaattaagtggtgcaggaatggtagaaacactggtagacaatgaaattgccgtccagaatctgacaaagatggcacagcagaagaactatggcgtccgttcagaaaaactgggcgagaaccagtacagagtgattatgaccatcggagaatcagcggatgaggcaggagttgaagctgatgaagaggtaagaacagaagaaacctgtataccggacggaagaaagggcaataaagtcgttgttatttcatcttcctatatgggcagcggggatgatgaattgggtgctgttctgatgaagggtttcatctatgccctgtctcagcaggatgaactgccgaaaacaatactcttctataatggcggtgccaaactgacatgtgaagaggcaccgacgctggaagatttgatgtcgcttgaagcaaatggtgtggaaatcctgacatgcggtacctgcctgaatcattacggtctgacagagaaactgaaagtcggcggcgtgactaatatgtatgtgatcactgagaaaatgatgcaggcggatctgatcattaaaccataatttaaaatatagaatcatggaagaacaggatggcggtgtatcgtgcgtcaaaagaagaattatatgatattgacatttaagactacaacggcagctatggccatggagaagaagtgcagcgaggaggggattccgggacggctgattccgctcccgggagaaatcagcgccggatgtggactgtcctggcggatattgccggaggagtatgagacatacaaagacaagattatgtccttggatattccggtggaacaaactgtcgaagtgcggatataaaacagaaaaatacaggatgataaaaggcaatcgtcgtatgttgagaaaatttaaagaaaaattcttgacaaggatgattgcctttgttataatatgcaagtgtgcgcaataggcgtgtatacaccgttatgtaaatgacggcaaccagttcattttattaccaggaggtgaaaataatgccaacatttaaccagttagtaagaaaaggaagacagactgttgagaagaaatctacagctcctgctctgcagaagagctacaactctcttcacaagaaagcaacagacttatcatcaccacagaagagaggtgtatgtacagctgttaagacagctactcctaaaaaacctaactcagctcttagaaagatcgccagagttcgtttatcaaacggaatcgaagtaacaagctacattccaggtgaaggtcacaaccttcaggagcatagcgttgtactgatcagaggtggtcgtgtaaaggacttaccaggtacaagataccatatcatcagaggtacacttgatactgcaggtgttgctaagagaagacaggcccgttctaaatacggtgctaagagaccaaaggacgctaagaaataagagtttcacaggtttatactatttgcgacgaatgtagcattattttaccgcaatgaatataaggttgcgattaaagatagatatacaattcgagcgcgaacacatagtcagactacgtgagtacccaagattgaataatctataaggagggaagtaacgtgccaagaaaaggacatatccagaaaagagacgtattggctgatccgatttacaacagcaaagtcgtaacaaagcttgtcaacaacatcatgcttgacggtaagaaaggcgttgctcagaagatcgtatacggcgcatttaatagaatttctgaaaagacaggcaaggaagctctcgaagttttcgaagaagctatgaacaacatcatgcctgttcttgaagtaaaagcaagacgtatcggtggtgccacatatcaggtgcctatcgaggttagaccagagagaagacaggctcttgctctcagatggttaacagtatattctcgtaagagaggcgaaaagactcaggaagagagacttgccaacgagattatggatgctgcaaacaacactggtgcagcagttaagaaaaaagaagacatgcacaaaatggcagaagcaaacaaagctttcgctcattacagatggtagtctgtttttagcggctgcttagctgagaaaaggaggaattatccttggctggaagagaatatccattagagagaaccagaaatattggtattatggctcatatcgatgctggtaaaacaacaacaactgagcgtatcttatattacactggtattaactacaagattggtgatactcatgacggtactgcaactatggactggatggcccaggagcaggaacgtggtatcacaattacttccgctgctacaacatgtcactggacacttcaggatcactgcaagccaaaggcaggtgctttagagcatcgtatcaacatcattgatacaccaggacacgtagacttcacagttgaagttgagcgttcccttcgtgtacttgatggtgctgtaggtgtcttctgtgccaaaggtggtgttgagcctcagtccgaaaacgtatggcgtcaggctgacacatacaacgtacctagaatggctttcatcaacaagatggatattcttggtgctgatttctacagtgctgttgagcagatcaagacaagattaggtaagaatgctatctgcattcagctcccaatcggtaaggaagatgaattcaaaggtatcattgacctttttgaaatgcaggcttatatctacaatgatgaaaagggtgacgatatttctatcgttgatatcccagaagatatggtcgatgatgcagaactttatcatacagaattagttgagaagatctgcgaattagatgacgatctgatgatggcttaccttgaaggtgaagaaccatctaatgatcagttaaaagctgtattaagaaaagctacatgcgaatgtacagctgttcctgtttgctgtggtacagcttacagaaacaaaggtgttcagaagctccttgatgcaatcatcgagtatatgccatctccattagacatcccaccaatcaagggtgttgatatggatggcaacgatgttgtcagacattcttctgatgaagaacctttctccgctcttgcattcaagattatgacagacccattcgttggtaagctggcattcttccgtgtatattccggtactctgaattccggttcttacacactgaacgcaacaaagggcaagaaagaacgtgttggtcgtatccttcagatgcatgccaacaagagaaaagagctggataaggtttactccggtgatatcgcagctgctgtaggtttcaaatttacaacaactggtgatacaatctgtgatgaacagcatccggttattctggaatccatggaattcccagaacctgttatcgagcttgctatcgagcctaagacaaaagcaggccagggcaagatgggtgaagctttagcaaaacttgctgaagaagatcctacattcagagctcatacagatcaggaaacaggccagacaatcattgccggtatgggcgagctccatctggaaatcattgttgaccgtctgcttcgtgaatttaaagtagaggcaaacgttggtgcacctcaggttgcatacaaagaaacatttacaaaagccgttgatgtagacagcaaatatgctaaacagtccggtggtcgtggtcagtatggtcactgtaaagttcactttgagccaatggatgccaatggtgaagaactcttcaagttcgattctacagtcgtaggtggtgctattcctaaggaatacatcccagctgtcggcgaaggtatcgaagaagctgctaaagctggtatcctcggcggattccctgtacttggtatccatgctacagtatatgatggttcttaccatgaagtcgattcaagtgaaatggcattccacattgctggttccatggctttcaaggaagctatgcacaaagcaggcgctgttcttcttgagccgatcatgaaagttgaagttacaatgcctgaagaatacatgggcgatatcatcggcgacctgaactcacgtcgtggtcgtatcgaaggtatggaagatatcggtggtggtaagatggttaaagcatatgtaccacttgctgaaatgttcggttattctacagacctgcgttcaagaacacagggccgtggtaactactccatgttcttcgagaaatacgaaccagttccgaagtcaattcaggaaaaggtattaaacaacaaagataaataaattatccttgctgtgtacaggtaatgtacagcttttaaatacgaaaatattttaaaataggcttgaatatatgctgtaaatgcaatataatcgtaattagccgagcaaaaataataaaaatctgcctctcccgaacgggggagaggcgcctataaaaggaggacgttaaaatggctaaagctaagtttgacagaagcaaaccacattgtaatatcggtacaattggacacgttgaccacggtaaaacaactttaacagctgctatcacaagagtattagcagaaagagtacctggtaacgaaaaagtagatttcgaaaacatcgataaagctccagaagaaagagaacgtggtatcacaatctctacagctcacgttgagtaccagacagcaaaacgtcattacgctcacgtagactgcccaggacatgccgattatgtaaagaacatgatcacaggtgctgctcagatggatggtgctatccttgttgtagctgctactgatggtgttatggctcagacaaaagagcatatccttctttcccgtcaggtaggcgtaccttacatcgttgtattcatgaacaaatgtgatatggtagacgatgaagaactccttgaattagtagaaatggaaatcacagaagttcttgaagaatatgacttcacagattgcccaatcatcaaaggttccgctcttaaagctcttgaagatccaaacggcgaatggggcgacaagatcatggaacttatggatacagtagatagctatatcccagatccacagcgtgatacagataagccattccttatgccagtcgaagacgtattctctatcacaggtcgtggtacagttgctacaggccgtgtagaaagaggtgttctgcatctttctgatgaagtagaaatcgttggtgttaaagaagaaacacgtaaagtagttgtaactggtatcgaaatgttccgtaaactccttgacgaagctcaggctggtgataacatcggttgtcttcttcgtggtgttcagagaaatgaaatcgaaagaggacaggtcctcgctaaaccaggtacagtacacccacacaagaaattcacagctcaggtttacgtactgacaaaagacgaaggtggtcgtcatacaccattcttcaacaactaccgtccacagttctacttcagaacaacagatatcacaggcgttatcacccttccagaaggtacagaaatgtgcatgcctggtgataacgtagaaatgacaatcgaactgatccacccaatcgctatggaacagggtcttacattcgctatccgtgaaggtggccgtactgtaggttcaggtcgtgttgctacaatcatcgaataatattcgctaagcaatgagcaatgcaaatccaacgaatgatgagttgtgcattgcgagtataacgcgcatatcgtatataaatgagtgtcaggagtacactctgtgtcaaaacgtaagataccccggaaccgtaaggtttccggggtttttctgtactctaagaaaagaattgtttctaatcgcaatagttacacataaagaattgccaatttttatttctatcttgcagattttgggacttgtttttacgattcttttgtataaaggaattattaagaagcagaataattgcttaaacaatagtcatggaaggagatatcgatgatgacgaaatcttttgagaatgattcagatacaaatcacggtctgaatagccatagaaagccggaggatgcatcttttatgcgcgaggctattcgtctttcacaacttgccgtagaacatggaaatgagccttttggagcggttttggtaaaaaatggaaaaattgtatttacgaatgaaaatcagatttatacaagacatgatccgacctttcatggagaagccggactgattcgtgaattctgtgcaaagacatcaatcacagatttgcatgactatacgctttattccagctgtgagccgtgttttatgtgcagtggcgcaatggtctgggtgaaattaggccgattagtatacggtgcaagcaatagcgatttagaggcgatacttggtaacgaaggatgtaattgttcaaagattgtttttgacaattccttttggcagccacaggtaacagcggggattcttcgggatgaaagtctcatgattctgaaggattattttgatacgcatgcaaaaggttgatagggtatattgatcagaaataataacgcaattgtaaaataataatgccattcatggttgaaatccggctatgaaagacagcaaataggtgggtatcgttcgtttgggacaaacaattgtgacaatataaatacaatatagacggatatgcagcaataactaaaaaaatcaaattagtgtatatgagaaataaaattcgatatattattaaaaaaatcaaaaaaactgttgacaattcaaatctaagatgatatcatatacaagctgtcagcgagaacaacgcgaaacagcaagtttttcatcagatcaaaaagaaatttgaaaacaaatgaaaaaagttgttgacaaacttcttccggtttgatagaatagacaagctgcttcaaacgagcagtaacgaactttgataattgaacaacaaaacaatcccgaaaattcctaaaaagaggctccagaggcactgctgttgccgcttacattcagtccatatccgttgttcttcatactttctatatagtatgttccgttcgccaccgttcttccgcttcccagtaccatgaaggcactgttcacgagcgttgttgtacctgcactcgtctttgccgttaccttataccggtacccgcctgtccccaggcttccgaacttgatgctcgtatccacatttattacttttcttcggtattttacaaccatgatcagatgataatacatcaaatatactgaatgtgcattatgatccatttggtccatataatcagtcctttctatcctttcgactgattatagtataccacacttctcgtcacagaacaagcgttctattttcttttttctgcaattcatctcccacctgtagaggaaggagaattcttgctaacttttgttaaaaaagagaatcaagtttttgattctcttcatacattcattatagcttttatcatccattttatttgccccaaacagccgctgcattcgaccttacaagcagttcttccacaggcagaccaatcggacaaatatcatgacaagataacgacttcccgcatccttcaaaaaatttcttcttatattcagcagaaatctcattcaaatgagtgctttcctgttcttcattcagaatccgaaatgcgttgactgcagcaacagtgcctgcgaaagtcctatttgcagagaagttaggacacacttcaaggcaacagccacacatcagacagcgtgccgactggtatctcggttcatgtgtccgcgaactcatataagcttcactttcaagccaaaggttcagttttttcaaattttcaaacagatttgaccggtcaacgatcaaatctcttacaagcggaaatttgcttaaaggttccaaggtgattgtagaaccttttaacgtatgtagaaatgtagagcatgccagcctcggacgttcgttaatcagcatggcgcaagccccacattttcgcaccatgcagctacattcccagctgatgggagtaactatatttcctgaattatctttcaaaggggttctactgttcaattcctttagaacagtggcaacagagctgtttttgcttccgtcatactcaaattcctgccaataactgtctgatttctgactctcctgccgcctgattcttattttatataccaagtgaatcactgcctttctggaacaggtacaaaggaaatctgtatctgctttccatcaaatctagctaccgttgttttaaggtaatcatcgtcattgctcttcggataatcctcccgccagtgtgcaccacggctttcttttcttgcaagagcactctttagaactgccatgccaagcaatggaagatttcctgtcagcgcttgtaccgtttgaatcccatttaacaacgtattctcatttctgacaacgcccatagtctcctgcatcactttgtttaattgctttatttctgaaatttgagacgctggtggaacatctatctgtgtcgcacaagatagctctactacatctgcctgttcgcatgctgattttgccgcaacacgtcctccgtataacgctcctaacagagaatttccaccaagacggttggcaccatgatattgggcacagcattctccggcagcgtaaagattctgaatcggcgttctgtgctgctcatccaccagaatgcctcccataaaatagtgaattcccggtaaaacagacaccggttcctttcgtatatctttatgcagataggtcatacaatcgtctgccagaccagatagcttatttgaaataatctcctccgatatttccgtcatgtcaagaaatacctctgattcatggctgaccttccatatctctctggcggtaatatctcgtggcatcagatttccaagctccgggtatttttcctccatgaaataccattgttttccatctttcatggcaaacaacctgccaccttcccctctggccgcctcgctgatgagcatgcgttttccaccacatttcacagttgtcggatgatactggatcatctcgccatttgccagaggaacaccaagccggaacaattctgcggtgacttctcctgtattgctcagcgaacccgttgtatttccaaacaatccgtgcataccaccggtggcaacaataaccgcatcccccggtaattccacagtctcctgactgtattcatccctgattacgcagccacaacaaatattgccacacagacgaagtgttaggaaagaatgatggctgaaccgttctaccataccagatgcttctttcctgcgaacagcgtctatcatagctgtcatgatctgcttcccggtatcgctctgtgcaaaagcagtccgtttctttttctgcccgccaaaattccgcagatccacatcatcatagccactcatgttaaatttaactccaagttttaacagccagtgcaccagctccggtgctgcctgtgtcattccccaaactgcatttggatctgccagaccacatgctgcctttattgtatctgtaaaatgttcttcgggactgtcgttttcatcttttgtattcaaagctgcgttgataccgccctccgccataacagactgtgcccgctctgacggaagggaggaaaccagttttacattgcatccattttccgctgcctgcaaagccgctgaaagtcctgccagtccagcacctataataataattgtcttactcatagatattgccacccaatataatataaaataaccgctcccgctataaaaagaagaagcaccgaaaggatcaaataaatatcactccttcgttctttataactgatgattcccagtgatacgagcaatgggcggatattgataaaaatatgaacaaagattgccgctacgaacaaaagctgagttaccatctttacagttgtaaaagggaacaaaatatatgtcccattctgcacctttccaaacaagccaatatggaataacaggagaatcagtattgccatcccactggctcgtctcgcccaaaatatgacgttttgtttcagatacatttttcctgattgcttcgctgtctgtaaactctgaactgtcaggatgacaccaatcaccgtatgcacaacaagaataccaacaccaatccatgcaagaagtttcccggcactacttccaactccgttcagcataaagctgcccatgattccatgaatcataaaaatgagaagcattaaaacagacaaaatcgtattccattttctcataaattcccgctcacctcatttcttctctgtccatgatcatatagtccatctgtgttagcgttgtaacgtcaataaaatcatccgatgccaggaatacatcatactttccacttaccactcttgatagcatcattgtgttactgtactctttcagatctacgaaaaaaccggcctgtttcaacctgtcacagagtttcttagcataactgacaagcggataatccgtctcaggtacatataaccgaaaactaatgtccgttttcatgagatctgtttcatttgtttccgaatcgtccagtgccaattcttttaatttattccgggcgttctcgttgtcgagaccatctgacatcatattaataccgagaacataagagccttccaactgtgcagaggcttgagccaccttttttgacttcggtgttgctcctgtgactgcatcaatcatagaaggcggtgaatgtaatatgacaccaaaacctacaagaaaaacaatcgtaacaactaacagaatcagttttcgtttcacattcccacctcatttcctattttttcaaaattctcattgcgttcaaaacagcaattatggtaacgcctacatcaccaaatacagcttcccacattcccgcaataccaagagcgccaagaatcaggaacacactcttaatcccaagagcaatcactatattctgcatgacaatctgttttgtcgcttttgctacttcaatcgcgtccaccagcttagacggttcatctgtcatcagaactacatctgctgcttcaatggccgcatccgaaccaagcccacccattgcaataccaacatctgcacgggcaaggacaggagcgtcattgataccatcaccaacaaaagccaatttgcttcccggtctctttttactatctaaaagctcaaccttttccactttttggtcaggaaacagctgtgcataatatttatccaactgcaattcttctgcaacagacttcccaattttttcatcatcaccggtaagcatgactgttttttccacgccgatatgtttcaggtcagaaattgcttttttactgtccggcttcacttcatctgttatcaaaatacatcctgcatattgaccatctacagccaaataaacttttgtacctgctttttcacaggttgtgtactctatacattctgtgtccataagtttcgtattgcccgcaaaaactttctttttccctgccattacactgattccatatcctgaaatttccttataatcagaaatcactgactgatcaatttctttttcataagcagcaagaatggattttgcaataggatggttagaaaaactctctgcctctgccgcatactccagaacctgttcttttgaaaatccatttgtaggcaaaatatccgtcacattgaaaacaccttttgtaagtgttccggttttatcgaacacaataacgctgacattattaagtgcctctaaataattgcttccttttacaagaacacctcgtttagatgctgcaccaatgccgccgaagaaagtcagcgggattgaaataaccaatgcacatggacaagataccacaaggaaaacaaatcctctgcgaatccactctgtccagcctccgccaagaatgatcggtggcagaatcgccagaaaagctgctaagattacaaccacaggtgtataataacgtgcaaatgtagtaataaaattttctgttggtgcttttcggcttgacgcattttccacaagatcaataatctttgaagccgtagattcaccaaatgcttttgttatcttaatcattaagacacccgtctgattcatacaaccggaaagtgcttcgtctcctttatgaacacttctcggaactgattctcctgttaaggcccttgtatccagcatagaatctccatccaataccacaccgtctaatggaattttttcaccaggctttacaataataatctcaccaatggagacattttctggagatatggtaatcaattccccatttcttcttactgtagcagaatctggacgtatatccattaagtctgatatagattttctggaacgcttaacagccaatgactgaaaaaattcacctacctgatagaataacataacagcaactgcttctggatattcaccaatgacaaaagccccaatcgtagagacactcatcaaaaaatgttcatcaaatacacgcccctttgaaatgttcctcacagcctgccatacaacatctccaccaagaataacataagaaacaatgagaaaagctaactcgataggcaatggcactttcgcaaaaacagtcaatgccataccaatggcatagattgctgcaccaatcgctaaacgaactgtcaacttcttatcctcattgttataggattcattggcctcctgctttttttccggtatataagattcctgtacaatttcagaaacttccacatctggctcatggctatgaacaatcgtttcaatctgactggctatcgtatctgcggatgtctgagcaacattgattgtaagcgtctgcttcatcagatttaccactgaggattgcactccatccaactctccgacttctttttcaatttttgcggaacaatttggacagtccaacccttttaatagaaatatgcgtttcatgataatctccttgcaatttgtttagttgttcaattactcaactataatgttaaaaaatattatttctgccaaagatgctcaaatcccttgtcaataatctctttcacgtgatcatctgccagcgagtagtaaactatctgtgcttctttacggaattttaccagattcgctaggcgtaatgcctttaactgatgcgaaattgcagattttgttacccccagtagcactgcaagatcacatacacacatctcactctgttctagagcgtgtaagatttgtactctagttccatctccaaatagcttaaacaaagaagccaactggatataatcatcttttggctgcatcttggatttcacatcattcacaatatcctcatgaattacatcgcaattacaaatataagacgtttttgacatatattcacctccaaataataatagttgaacaattactcaactattattatacttatttttaaatttatgtcaataagctgatgttagttccccataaattttacaattaaaaccagctcttttctgcacatacacccaacaggcaacgctactggcttctgatacaatgtcagctatggttttgcgcataagctcttcaaattcagcaatttcttctttttggacaatatcatacagtgttggtgcctgatgacttaattttacgccattttcatttgcatctttaagcagattcttaactttttctcttgaattctccggtactttcatgtactaccacatcggacggtgtgtctttttttagtggtggtaactgaatataatcattgttttcgctcattttcatattctcctcacgatataataaaatcaataatacgttctcttgtcatgtccagtacagtatctacaaacactcctgcaaacaggatcagatacagaattacactcagcgaaaatagaaatgcaacctgtacccagtcatgataacagtatgcagtcgctataatcaataaagtgaatataaatccaaggatccctctgacaaccgcataagtctgtactgtcatcttcactgtcaggccaattacaaatatgaagttttggctttatcttgtagtttgcgaatatccgtataaatagaaaaagccctttgagaaagggatttctcctctctcaaagggcaagttggcaaacttgaagttagcgatttctttttccggtattctctgtcccacgggtttcctcatgatagaaataatctacgatcaccggatgcccctgcgggactctgccataaggcatttcattatccacaaaggcacaatcatacttcttagccattttctcagcttttacttcaagtgcttcaaagtagctgcggttatgcttgttatagatctcgtcgtaaagtggtacaagatcaggatattttccggcgatataatccataattgtctttttgaaaccgcctcgaagattgagattttcgagccagaacagatcgcactgattctttacccgctcaaagattgcttcaaaatccgtgataccggggaataccggggatacgaaacagactgtacggatacctgcctcatatacctgcttcatagcagcgatacggtgctcaatgctcgaagcagaatccatatcgttcttgaaattttcatctagtgtgttgatcgaccatgaaacggttacacgtccaagcttcttcagcagatcaatatcccgtaccacaagatccgactttgtgcagatcagaatatctgcgtcactgccgatcagctgctccagaagttttctggtattcccgaattgctcctcctgtggattgtagccatctgtcacagaaccgatgaccacccgctgtccggcatatttcttcggatttttaatttccggccaatgcttcacatcaaggaaagtgccccattcctccttgtgcccggtaaagcgcttcataaaagaagcatagcaatacttgcaggcatgtgtacagcccacatagggattgaccgagtaaccgcctaccggcagactagacttagtcatgatgttctttgtttccacctcacgaatgaggattccattcattacttcttccatgatttctgtacctctaacactttattaaattcttccggcatttcctgaatcatattttcatcccctatgatagggacaaggtcttccttcataaacaccggaatgccgagcttatgtgcctggcccgtcagagaccatgcccattccggctccgtatgaatcttcctgctctgagctccggtcatggtgccgacaacgatccaattgattccggaaaggtcaactgtgccgggatcatcgaataacggctcaaaggtaacatggtaatgttttgctctgacgtttttccgaagggcgtcgatacgccaccgttctgctttcctcgtcaccgtaacgccaaaccatgcgttttccagatcggtatcaaaatccagcgaatcaggtcgcttggtaaggaacaggaactgatgctgtgtattttcacggatctttgcaaatacctcgtctctccattctggcttccatccggagagatcgctcatgccggtaagaagaaagttctgcggacgtttcttttccatcatcctgagcttacccggaaagaattcagggtcagtgaagtcatcaatcatatgccagcgcttcacattgttgcgggcatagcaatatgcacaccccactgtgcagccgatgacgagattcatgttctgaatctgatttttgatacaaatactcatgacttctgccactcctcaagattctttctgatgcggtcgaggcattcctcaaaccgggtaatttcttcctctgaaaaacctttgtagtaaatgctgcccatctcatcagatacagaatcgtactcgccctttaaggcatgtgctttctcagtcagaaacaggagtgttttccttttgtccgtttcagactgaacacggcttatcagcccttgattttccattctttccagcatcgtagtaagagatgttatcgctaatccgcatttgaccgagagtgacctgatcgagattccatcctcctgccacagcacataaagaatgcgcccctgggctccattgaacgcatcaatattcttttcgctgagaatcttctcaaaaatccggtcaccaagttgttttatttttgtgacaagaaatccgccattcatttccatacaaaagctcctatatagtagtttattaaaaacatactatataggagctttattgtcaatagtttatatgtcttaataggtaaattccgtttttttcaattctccaaattggaattgttcaagcttttcaaatactaacgtccttaattctgttcaataattgatttatagtagttaccaaaatcagcaagtgaattaacaattggaagcatttttgttccgagttccgttaagccgtattcaactctcggtggctgctcatggtaatcgtggcgatatgccagcccatcactcatcatttgtcttaaactatctgtcaaaaccttttgtgaaataccatctatacttcgttgtagctcattaaatctccatggacgctctttcaagttacgcaaaatcagcagtttccattttcctccgataagagatactgctgttgcaactgggcattccggtaattcttcttttgctcgcataattctcacctccgagtctattgtaacacattcatttttgagtgtacagttacaaaaaggtgcgtacttgtttttgtatgtgtctcacactatactaataccaagcaaccagaaactacaaattaactatggaggttattatggcaaattacacaaaaacaactattggaaaagaaaaccgaattgagctacatgaaaagttgtctttaacaggtgcagaaatcagtttaaacaaactacctgcaggagcaaatgtcccatttgttcattctcataaagaaaatgaagaaatctatggaattctttcaggtaacggcaaagccataattgatggagaagaaattagcctttcaactggagactggctaaaaatcgcacctactgcaaagcgtcagttttttgcatccgatatttctggaattacttatatctgcattcaggtaaaagaaaattctctggaacattttacagcagaggatgccgtaatcggctaattaaaagtatttatttacaaaaatgcacagttcacgataagctaagaactgtgcatttcttttttgttcaatattacgttttctcaatttttcaaacaagaagttatcagtgattatcttttagaaaacagtcaattacagcgacgccaaatccaagaacacctaggacatatccccaaaaattatttgttgtcacagcaattcctaaaggtattattgcaatccccaataactcaatcttaattcctttcatcgcaaataccttcgttacaaactggaagttatctatttctcctcttcgttaagacctagttcattacatattacttgctatccatcataccttattctttctaccagcgtttcctttttcagattactgcttaaaacgaaggaaagtacaatctgcaacagaccgaccaaaaaaatcataataaaaattggtacgattggaacatgatagatattcattccaaatattccattatgttttgcataggaaaaaagtgcatagccgagcggcagaccaatgatcaaagctacgcatatggtgccaaccgtaaaaatcagtccctgtaactgcagacataaatttaattgtttatttgtcatacccacagcctgtaatataccatattcctgcttttttgtcgtaatattcatgatcatggtattcgccatattcataaacccgatgagtcctacaatagccataaacagataacagccaagcttcatcatgctgcttgcaaattcggcagattgtaactgcgcatgataagtatccatttttatatgcgaagtattagaaatcaaagtattcagactttgttctacagatgccacatcttttttatcacagtccacccacagatagccataggctgttcctctcggattcatggaacgatatacaccttccggaatgacaagataagtgtccgcacttacaaaagatcctgcaatctttccctgataggtataggttccacttccattctcaaagtcaaatgcaatggattcacccggagcatatccatcttgttccatccacgttgaccagccaaagaaaatatcaccattctttaccgcctgatcatagtccatagagccaatatccccttcttggcgcataaaatcaaaatcctttttactcacaatagtagccggaaatcttgttccgttcagatttacagagacaatctctctcgtcatgacatctgttactcccggaatgcttttgatttcttcaatcagcgaatcattcaatggatcatccgtcagaatcgtatccagattattctccggatatctttcatcatactcagcagaatagtcaagctgcagttcaaattgtccatgattaacggaaagacgtgcttcatgctccgtgtcaatatttcccacataattagagataatcacaaacaatacgcaagaaaaacccattgtgaggatagtaccaatagttcttttgggattacccgttacatttgccattgccatagaaaacacggtgacattttttctgccatttcgttttccttttttttgtgtttctgcattttctaaataccgtgttgcttcgataggtgaaatccgtgaaacaattttcattggtttacgcagtgccaaagcaacggtaagaaatgatacgaaaatacagagaagcataacaggcagggaaaacagaggcacctgctgattttgaactcccatagagccagttccggttgatacaagatttccctgctccaccagccagttgaagctgacttttgcaatcaggaaaccaaacagcagccccagcggtatcgaaggaaccgccagaagaatgccctcacgaaagatcaactgcttcatctgctttctggttgcacccagcgccttgatttttccgtactcctgaaccttctgggcgatcccgacctggaagatattataaatgaccacaacggaaaacagcacgattccgaggatcagggttccacaaaccacaatcatttcatagctcggctgcaatacccactgcaggtagaggtcattgatgatcacgtttttctggtcaatgccgcaggaatccgcgatttcttttataacaggcgcaacattattcatagatacatttgcagaatcgctcaaggtaaaatagatattatattgcctgtcaccctccgcaacacgctcattataaaaatcctgcgaaccgaatacaacataggaagcctcgatggtatattcatcccggtcatataaaatcccgctgacagtaaattccaccggtgcgtattccgactgcatgccggaacgatactccaatgttacggtgtctccgacctttacatcatggtatcccactgcatcaaagaaagcgcgtcctgcggcaatttcctgcgccttttccggataggtaccttccttcaacacatattcctgattatagggaagcattttcctgaccgtttcatccgcactgacaaagccgccattttcatttcctttcaggatgccctccgtacacatgataccgatatcagatatctcagctctgcgttccacttcttttaattgcgtaccatctgcggcgataaacaggccgtagttgcttccatatgagcttgcagactgatccttctgtaagaggatcagtccatttccaattgtactgataatgaccagaagcatggtagtcaggcaaatcgccgtcataataaggacacttcttgtccgatttcttttgtcgttgctgaatgcaattttgctgatcgtcctcaattgaaatccaccacctgtccatcctcgatgactaaaatacggtcagcaacctgcgcgatctcatcatcatgggtaatcattacaattgtctgtccatatttttttgctgtcatcttaagcagggcgattacctcatcactggtcttagaatcaagatttcctgtcggtactgctttgttagtacaatcaatatcttgtgattatccacacagttatcccctatatgtggacaaaataaaagcaaggcggcgcattgtccgtcttgcttctcttttactccaaaattatcgacattattcttcgatgtattcaaccagcttcggatcgccactgatgaaatatccgtcaagtgtcttatacatcggctttccgtccacttccatcacatgtgtgacaatcttttctgtgaatgctgctgcacctctgacagcgtcattgctccatgaaggtgcttttctgatcctgaggctaccattgaacacccttctgatctttcctttgattctgaccgctgtcatgccgtcaatgttttctgtgacagcttcttcagctgccttgatttcttcagtcgttgccgttccgacctgatttccgtctgcatcgaatgtcggcacgtttccgtctgcatctgtgtccagcgcgccttcaggtacagtgtcggtcattgttgcctgctgctgttcctgatctgcctgatcggtttctgcatcggtcttcttctcctgatcggtctgatctgcgctgttggttgcctgctgctcctgactgccgtctgtggctgtctgtggcggctctgctggcgtttcaaccttttccctgaagtcttttaccacttcgccattttcatcaaatacagcggctttcactttctctgctgccttctctgctgcatccagtttcttgtatggcttatttttctctttgtcgaatgtttcgcccatgaagtattccatcgcgcttcctccttatttcgctgtgatgtatcttgcgtttacatatccgtacttcttgccctttgctccgtcaatatagatgtaataccacaatgcgccgttcggtgcttttgcgcttccgcacactccgacttctgtgttctgcttgatgcaaggatatgacacaagtttgtctgcatctggatcaggctgctttctgacattcagtgcgcctgtgttcacatatccagtgaatgtcgctgtctttgctgttccgtatggtacagctggattattgcctgatccgcttcctgatccgttgccgcctgacacgttgcatccgttttccagtgccatgattgtgtgcttgcctgctgccactgaaatatcgccagtcataagattgtcgcctgtgtctgtgtacttgcttcctgtgagtttttcaaactctcctgttgccataatagcattgaccatgttgcctgtgtaaatatcctttgacacgctgattcctgcgcatttaagcactggcgacatcatcgcactgcaatcggtttcgcaaggtgttttcaatgctgtcggattccagccgaccttttcaagttctgtgtacagtgaagttctgtgtccctgacaatatccgacattgtcattcgcgcacagctgcttcatcgctgtcgccgccttcgctgccttgtttctgtccttgaaacgaagcacgactgtctgaccgaagtcataccagtttccagtctttacttcacgacctgtctgatcgcctttctgtcctcctgttgcttttccgttttcgtcaatactagcccatccgcataatgttcccatgttcttttcctcctgttattcttctgttaatgctgaaatgataatgcaaccgatcacaaagatataaaatatcaataccagtggggctgctaatgataccacgaaggcgatcaggaatgcttttaatatatacccgatccagtccttcgctgttggcggcggctcaacctctgcgccgtgatgtttcgcttcttccttgtcgatctcaacgcctgcgatcagcaatagcataatgatgactactgtcgccatgaagcagatcgcgtatgatgtaatgtaagcatgtagcattccttttgacctcctgtctttttattccgtctttatcttctgcgcctgaagcgcagctgctaccgctgccgcttctctttcttcaggcggcttgactgcttcagcagccttctgattctttttcaaaatagcgttcagttcttcaactgccgcttcaatcagatcatcgaccatgtctttgtcgatcagtccttctgatatgtattccgtcaacttctgctgttgtgcctgaagttgttcccacacccatgacttcttgattgttcctgtgccgcttccccattccttttctgcctttgatacgatagacagaaggctttcttttaccagttccacgactttgtctgcctgttcctgaagctgcttcttttggtcttcctttgactgcttcaggaagtttctgaccttgattccgatgcctgccacaatcgcaatgattgtcaggatcatcggcaaattatcataaattgtttttaatattaaagctgcatttttcatccgttcgcaccgccttcctcgttttcactttcctgctttccttttttgattttctgccagttctcaattcctgcctttatcatgtacccgaacacacccatgcgaagcacttctgatgtttcgctgatcagtgtggtcagcactgatgtgtctgcgaagtgccagatcgctattactgaaaacagttcaatgatgatgtaaagcagcacgcagacaaccacaactttttttgaaaactccatgatccagcttgtcagcgacttcttgcgtcttttctttcttctgcttgctggtattgtatagctgtacttctccacgcgctttcctcctgttactcttcgatgtactgatgtggatgtgattcatcaatgatcttgtcaattctatccacacgcttatgaagctgcttcagactttccgatgccctgatgtaatactccctgatctctttcatttcgtttctgtatgatcccatttcagacttcacttcaatcatagtattctgaatgttttccagtttggtcaggatcgttgcatcctctctggcttcgtcctgtgtgtccttcttcacgtttctgttgcgtgtactgattccgaagaagattgcaaacgcaatcgacacgcctgaaagtaacaatgatacttcaatagtcattttctttttcctccgtcaaatataattgcgaagtgctgcttcgattgcatcgttttcgtcttctgcccttttgcgcttcccgaatagatcgtcaagcctgtctgtggcttcgtcctgcgtctgtatcgcttcgattccatgttgcgccattatttctgcctgttccctgacaatgtctgtcagaagcgtattcacggcgcacagcctgtcgatcaattcaatctgcgtcattattcttcactggcttcatactcttcgccagtaatttccttgtattcctctgctgtgatgccctttcctgctctcttctcattcagcgcaacccagcctttcagtgtgtcttttgtgatatagtccatttcccactttttcttcagcgaatcgaactttttgctgtgtaccttttcggttgtttctgtgtttgttcctgtgcttgtttctgccatgcttatacctccatcatttcttgcatcattgccacgttcatttcaattgatgacattgactgcatgatcatctttgttgctggactttcaagctctgcctgaagtcttgcatattcttcctgtgtcatagtcctttcgctgtacacatagacagtgcggtctttttctccgtcaatgcccttcctgatctgctctgcgatgctctttcgctgatagaccactgtcgggcttgatgtcgtgtcccactctgtcggcttgtccatactttctgactgataccattctgacatcattgttcttcactcctttctttgaatgcttgctgactttctttttcagttgctttatattgacatatggcttgatatgatcttcataaaagccataagtgtccgtatgtgtaaaccagcccattgatgccagcattgctgaagcatcataccagttgactttctctttctttgcaattctgtgcgccttctttgttgcacgcttcaggattgatttgcgaagcgttgtgcgattgtaatgaaatacaaatcccatgaagtctagcgcacgccctctggtcttcggtttctcttttcctgtcttcttgtcaatgactggcggtgctttcctgtcgggatattcaaaacggaacacttgccagttgtatttgattttctgatgcatttcatttttcatatattccgacataacatctttcagtctgtgaagtttctttttgtttcttccgaacgcaacaatgtcgtccgcgtatcgaattgaatggtcaacgccgcccagttccttccactcttcaacaatcttgtgatcgagttctttataattcagctgcgtgaaccattgtgaagtcacgaacccaagcggaagccctgacaaaaattcagtatctttccattgttcatcctcgatccattcccgatcaaattcaggtggcttcattgtcgcttcatgctccatgactgtgctgcacaatctaacaaatctttcgtctttgatcacgcgtttcagctttgtttcaattacgcgaatgtcttctgtatcgaagcagtgtccgacatctgccttcaggatatagaacttctttcctttataggcttttatccacttttcaacttgtttctttccactgtggcaacctctgttcggtatgcttcccagtgcgtgttcatatagtccatgaagcacgatcggttgaagctgttttatgatgcaatgatgcacgacctgttcatactgaaattcaggttttatgatttccctgacctttccgcagctatattcgtttatcagcatctttttatgttctggcggttgatatgtttcttcttccagcattttttgaagtgctttcacatgttcctgaagacattgcggttcaggtctgtcgtttccgacttctctttcttccttcagcactctggcgacttcgggacgtgtcgtcttgcgctttgctgcatcgtgaaaacattgtgtgatgttttcttctttcagcaattcttcaaatatatgtttatatgtcttcattcaaaaggtttccttcttaacacctgttgcacgttcacggctttcgccctactagcacaaccctttcttcggtttaactttcgccaagtggcgcggaatatcgtgtgcattaggttgttgtcccatgattgttaagagtgagagccgccgatgttccaattcgcattcgaagcagtgttgttcaagttgacgtaagcaccgcagttcgcgccgttgttggtgttaccgccgacaagcgcgaccgcaacgcagaagcatcggaaggcgcacacaatatccctattatttaatttttctttttacttacacttcaagggggggattgctccccctgtccccctgtgcggctatgccgccaaaggttcttcgcaagaaggcgagccgccgacgtaccaacccgcacccgaagcagcgttgtccaagaggacgtaagcaccgcagctcgcgccgtcgctggtgttaccgccgacaagcgcgaccgcaacgatcgtcacgttgatccagtaataacaacaacgatatgtcgaagcactgccgccgacagatttgacaaatcgtccatagcgcgtcatcaatgtgtctttctgccatccttctgtcttgcacgctgttccgacttttatgtagtcttttcctgtcaggttataaggcggcgacatcttcactttgattgttccgttgtcgcagatatagcccacaagtctgtcccagcggtttccccatggcttttcgcaatagaacactttcacttcatgtgttccgtcattatagccgaagaactgcccttttgtgtccagtgttcctgtcacaacttttccgtagtcttttgatgaatcattgacatatgtgctacatacgccctgaccgaacttcgcctgaaagttttcggacttactgatcaatgtcagaaggctttcgatcaggtttcttctgctccatgagataatcgtccagcctgttccgtttgctgctgccctgctgatctctgtctgcgcgttcgtgttgcagtccagtttcttccctgacaagctgcgaagtttcgcgccgtcatagctgccgccgtacataggcatgtacatatgatctgcaatgcttccatcttctcttgtgtatgcatctgcgttgtagttgctgtcaactcttgtgtcagatacgatggtatattcatagtttccgacttcgtactgacacagccatattaaaggaaattcagacatcgcattcagtgtcgttgatgcgtccccgacatcggatgcagtgccgtccagcttctttgaatggtctgtgtggtttaattcatacgcaactgttctgtctgccttcagcatgactggtctgttctgcttaatgaagaacacttcgccccatgaaccgaagtcaaatgatccgtctgtgaagttcatctttgctggcgtgaatcctgctgcatcatacagatatgtgatgcgcgtgtcgggattgctgtcagccttgttgatcttgattccatatcgcttgacattgctgaattttccatctttatcctgaagctgtgccagtattcctgttgtgtcagccttcacagcgtcaagcgtttctttgtctgctacataaagccttgccatttctttttcctcctgttatgttgtttcctctaagtacacaagccctgcttcaacaccgatcgtgtacttcttccctgttgcagaatccgacattgaattgattcccttctggatgtccttgcaagctgccgcgcctgcctgtgctgccgctgcctgctgctgtgccgactgtgctgctgcgttcgcggctgatgtcgcctgctgcatattgttgttgaagttccgaatcgtgttgtacatcgtttcaagtgtcggcgtatcaacgaccgctggaagatcaagaaacttgtcttttccgtttccgatcctcaatatgtacttgcccgatgttgtttcttcaacgccccattcattcacttcaaggatgcgccctgaagccttccagttcgctgttgtgtccttctttggtttgactgtccatgttgccatcgtgtttcctccttcctacactgtgcctgcatccgcttcgcattcttctgctgtgaacgctgtgccgccgtcacaggtcatcggatcaatgctgaacgctgtgccgccgtcaatcgtgcttccgactgcccccttgatgtccagcatcttttcatacatcttctgcaattcttcctgtgacttgtatgttgcttcagcgcgtgccgccgctgtattcgctgcgcctgctgccgtatttgctgaagaagctgcgttgtttgctgctcctgtcgcttcctgcatgatctgaagctgctgttgtcttgctgtttcagcagtttccctgtcctgttcgcttttcttccttcgtgcttcagcattgatcctgtcaacctctgccgatgctctggcagcttcagcaaccttcatcgctgcttcaactgacaagatgtcattctttgttgaaacgatgttgtcgatgtactgctgtactttcttttccagtgctgtgatctcattgcagctttcaatcgcagcatcattcctgtttgtttcttcaatctcaatcgtgaacgcctgtgaagataacacatacacgttttgtgcgtccctgatctcaatgtcgcagtgtgctgttcctgctgccgcaagtgcctgatttgtcagctcgaccatgactttgttgtcggtcactgtgcattcgttataacaaaagtgtttgtctggctttttgatgttcgcaataacgatgtaccctgtcgggatcgtgaacaccttgccattgtttgtcagcgcgatcctgatgaatcgtgtgcgcttgtcgccctgcttcgctgacgccatatacaagcgttcatcgcctgtcagttccagtgttatgtcagttattagctgcatcgccattgtcgccccctccttcctgatcggtgtcaggttcggtcttcaatgtcttctttgatgctgccttcgctttttcaagttcttccttcagctgcttgatttcctgttgtgcatcgttcacttctttgttgtatgcgttcagcagttccatctttgattgtgacttcacttcagacagtatgtcagccagcacgccttccatgactgtcgctgacagatcgtgttctgtgctgattgttgccattgcgtttaggatttctcctttcgcgcaagcaattctttgttcgatcggtttcatgtgccatcctcctgttattccagcgcagcttcctgatatgcaagtatcaagtccagctttgaatccatctgcgcaagcatcgtgtttttgatctgctgttcctttgtttctgtttcttcttctgtgattcctctttcgccttcaggcagatcaaggatcatttcttttgtttctgtctttgtatcttcttcaattatgatttctttgctcattatatattcgcgctcccttgtggtactgctgtaatcattccacctctgacactgattgatgatgtcgtccagccgactgttccgtttccgttgtcgtgaatttctgtcactatcggtatgcttttaccatctgccacgccgtagccgtttatattgacatcgtgaagatcaacattgtacatgtcgaaccaatgaccataaaagtcgcatcccagatggatgccgtactggtcatatatactattcgcgcgtgagaagcacagcattgttgtgtatgatcctgcgctctgtgacttcatctgcgcaaatgccatgtattttccctgatagtccagatcgaacacaagccctttgtgcgcgttgttccccgaccattcgtttgtccctattttcccgacataatacccatcacgatagaaatgatttcctcgttcgtcaaatactgctcttttttctgctgccgtcacatcgccgttgtagattgcaagctgaccatattccagctgaatgtatttgctgttattattccaagccacacgcacgttgtaggcgttctgtgtgatctttgttccgaactccgaattgttgaccttcttgttgacttcagtcgtgatgctgtcggcttgtaatttgatagccgcgttcatttcctttgtcgttgaatactctttcagctttttatcggtttcatcgttcgcattttcttcagccgtgtccgctgctgactgtgccagttcgtttgcactcttaatcttctctgtgactgtcgtcttcgtttcataggtctttgaaactgaaagatcaatcgcttcagcctgcaccttgatagccgcgttcatttcctctgttgttgaatacaatgtcagtttttcgtccgtcaggtcattcacgcttttaattttttcagtgacgctggtctttgtttcatacaccttcgacacttccagatcaatttcttctgccttcaggttgattgcagcctgcatctgttctgtcgtgctgtattccgtcagtttttcatcggtcagatcgttcacactcttgatcttctggtcaacaatggtctttgtttcataggtctttgacacgcccagtttgatttcttccttcgatgctgttatgtgcgtttcaacctctgtcttcgtgtaatatccatcttcaagaactttcttcgcgctgctgttagcgatcttgattgcttctgacttcgcctgatctgttgcttcctgctgtacttcagcaaatgtctttgttgcattcgacagttcaacagtgttgcttcgcggtgcttcagggtattccgtcagcttcacaatccgctgtttttccttcgtgcgtgtcttcttgctgatcatccagactgtatcgccaatgtcaaaatcaaacacgctgctgtacttctctgactgtcttgcaaggtcaatcacatctgctgtgtaggcgacatacggctttgacatttcatccagtttcgcgatgccatcttcgatcagacttgtcgtgtttgtgtatcgttcatcactccacacatatgtcttgatcttgctgctgtattgataattttcaagatacggctttcccagccattcgattccgattccgtctttccctaaagggatcagtcgcgtataaaaatcatatgtgtctgaagtcactgtcagtttcttcaggttcaatccttcgatgaagtatcgtccgcggtctgctccaatctgttcatatatgtcgatcgtctttgtcagactattgatcttgcattccacgcgatacgttgacaagcagtcctgaagaactttccatgcattcgtttcttcgtctttgttgattgttcttttctttgtgatctggcatgtgccgaccttccagcctgttccttcaaaagcaaattcaagacatgccctgatcgtctgttccttgctttcaaatccataagggaacacagccccttcaagttcttcgacattcaactgcgctgtgtattcattgaactgtgtgcctgtctttcttttcctgatgacgtattcgtcttctttcgtcctgatgtagtattcttctttcagaaggtcaacttgctttccgtccgaaggatatttgaaaatcaattccttgtcgccagaattaagtgtcttcacaatctttctgtctttgaagcccttcaggattccgacacgttcttttttgtcattaaaaatctgcatctgtcatcctcctaaatccacataggtttgtacctgatccgaacgatcgcgtctgtattggaaaacttcaagactgtctgtgcttgtgtgattgctggaaatttccacaaatcaacactcgcaaatgcatctgcgccattgtttgtgatgcgtccttcttctccgtcaatgatgatagtctgtcctgctgccagctgttccacgatgatgtcatcttcaaagccacttatcttgtaattcttcaatgtcttctttgcgtacacttcaatgattgctggtgcttttcgtgtcccttgtcggtcaatcgttgtctgtgcgattccgtcatattccagcttcagttcatcgtcaaaaaaatagccttccagtttgatgttcagcttgtatctggttttcactttcatttttgaatagtcactgcttgctgtgtatgccttgaactttcctttgtagccatcgacttcaacaacgcttgacttcgtgaaattttccaaaaatgccgacatcgacctgatcaggctgtttctatccttgcccctgaagtacatgcacaacttcagctgtcccagttccatatctgtttcaaattctgtcggaagaaatgcgcctgttacaatctcataatcgacagcaagcgaaggtggcagcacttcggctgtcagctgcttcgcgttgtattttcttgcgtcaatgccattcactttcatgctgccttaccttcctttccttttatcttccacaagctgttcatccactttcgtgtatgtcttgcttgccacttcttcgccgtcaatgtatgtatgattttcaaccttcacattcgttcctgactctatattcttcagcttttcatcaagtattgagttcaattcctgatagaatggttttagcggaagaatagcttcgccgcctgtttctggttcgccgccagcaagcagcttgtttccgttcattccgaagatcattgaatcgttcataataccgccgtttttgtaccagtctattgaaaagtgtggtactgatggaggattcaggctgaagcttcctgtgatcttcgggtgtggtaatttcagttttggaagtgaccatgtgaagttgaatttcgacttgatcgcttcgattgcattgtgtacagcgtttttcgcagcgttgatcggtgttgttattgcgttcttgattgcattccagaccgatgttgctgttgattttatgctgttgaacacgttgctgactgttgattttaatgtgttgaacacgttgctgactgtgttcttgatgctgttcacaacattgctgatcgtgctgctgatgctgttccagattgatgtcactgttgacttcacgctgttgaatatgttgctgactgtcgtcttgaccgcattgaacacattcgtgatcgtgttcttgatgctgttcacaacatttgaaactgtcgtgctgattgctgtccacactgtcgtgaatacaccgctgaccgcgttccatactgtcgtgataatattttggatcgtctgcaatgtcgtctgtatcttcgtgctgatcgtgttccagacattcgacactgtcgtgctgattgctgtccacactgtcgtgaatacaccgctgaccgcgttccatactgtcgtgatgatattctgtacaaacgtgattgctgtctgtatcttcgtactgattgcatcccagactgaaatgattgtatctttgcagttctcccagataaatcggaacggaactgtcaagatttcaaatgctgcgctgaagaactctgcaatcgccataataacgactgtgatcacgttcttgattgtttcaaagactgttgatacaaagtccctgattgtcgtgaatatgttgctgactgtgttccagattcctgtcagtacatctgaaattgtcgtgctgactgctgtccatgctgttgttactgcgttctttattccgtcaagtatgcctgtgaagaacgatacaatgccgttccagatgttttcaaaggttgtcttgatgctattccatacttcatcccatgaagtaccaaataagcccagaaaagcgtcagcaacgcccttgattgtgttcagaatattgctgatatattccttcagcccattccatacgctttcaaatattccttttactgcgtcccaagcccctgaccagtcgcctgtgaataacgacacgaacaaatcaaacacgcctgtgatcacattcagcgttgtttcaatgacatttgcgatattattgaacacgccttcgatgatcggtgctaacaaattgcagaagccttcccagattgccttgaccacttccccgaagttttcaaaatcaaagcccagcgaattaagcttgtcagtgatgtgctgtccgaactctgtgaacactgttttgattctgtcccagatttccgtgatcttgttcctgaagtcttcgttcgtgttccacagcgtcactatgactgccgtgattgctgcgatcgcagcgaccgcaattccgactggcgatgtgatcgccgcaagcgcgcctttcaggacagccatgccgcctgttgctcctgacgctgttgttcccattgccgccagcttgccaacaacttttccgatccctgatgatagctgtccagatacgctgatagcttttccgactatcgtcagcaaaggaccgatcgcagccacaacgcctgcaattttcaggatcgtttcttgctgctgtgggcttaatgctgcgaacttgtctgcaagttctccaatcttcgccactgccttttccatgaatggaagcagtgcatttcccacagttattccaatatcttccagcttcgacttcagctgtgtcagtcttcccagcaaattgtcctgcattgttgccgccatgtctgatgcagtgccgtcacaattctgtaatgcttcagcatagtcactgaaggacattccgcttgcaatcgcttcatctgacaagccagacatgattgtttgcaatgctgaaaactggttcgttcctgcgattgtctttgcaaggttcgcttgctgttcgtctgtcaggttattccatacgccgcgcactcctgtcagtatgcttgacaggctgttcatgttgccctgcgcatcgtacacttcaacaccatacttcgccagttcggttgcacagccttttgtatctgtcgcaagtcttgtcataatagcgttcagggctgttcctgcttcgccgcctttaacgccagcgttcgccattgtcatcaagactgctgttgtttcttccaccgaatatcccattgaagcagctgtcgcagcgcagtttttatatgcttctccaagtgcttcggttgttgtgtttgaatggctcattgcataagccatttcgtctgcgaattttcctgcgtcctttgccgatagcccgaacgctgtcagatagtctgtgacgatgtctgaagctgttcccaagtccatcgcggatgctgctgccagattcaagatgccgccaatgccttccagcatgtcatccgtcttccagcctgcaagtgccatatattcaaacgcttcgcctgcttcggttgctgaatactttgtatcacgcccccactgacgcgctgattctgtcagcttgtcagtttcttctgctgttgctccgctgatcgcctgcacttttgacatctgctgttcaaagtttgctgcaactgttaccgatgccgctgccacgccgccgatcgcggttgtgaccttcatcatgtgctgtcctgctgtttgcactgcctgtccgacttttccagccttttccgcgtattcatcgaacttctggcgcgcaagttccgcattgacatcacgaagctgcacttccatgttcgcaaggtcagcttcagcctgtgtgactgctgccccctgcttcttgactgctgcttcatactttgttgtttgtgcttcggttgttgccagctgcttttccgctttgtccagttctgtttttaatttctttgtttcttctgaattttcgccagtcgcttccttgctttcctcataggctcttgacagttctgcgacttttgtcttcagttcttcgctttttttcttgttgttgtccagtcgtgttgtcagtgtttcataatgtgttttacaatccgcgactttcgtcttctggacatccattttctgtgtaagttcgctgatcttcgcctttaacgcgtcagatttcgtgccgtacagtttggcgtttgcagcagcaagactgtactgtgacgacagttctttcatgcttgcgaccgccgctttcatcgccgactgatattctgacattgaagcaccgatcttgattgatgcctgcgccatatatgcacgttcctttcatcacttttcgttgatggtcttgatctcgaacgccacatgatccaaaaggctcataatatccgacttcataacatttgaaagtgaatcgttcagcccttttatacacagctttacaaccctgtccacattgtcgcggcacactttccagatgttttcatcgtccagctgcttttcagcttcgttgtagccgttttcttcgtcataatcatcgaatgctgacttctcctggtcgacttcatctggtctgtttgggtttaattcaaggaacttcggtgtgatgatgtcctgcatcacaaaatgaatcatctttgctgttgccagctgttctgcgacatctgccttcagcacttccctttcagatatgccgaatatcattttcataattgctgcattgaattgaaacgcagatgcaacatcatcgccgttgttcttttccataagttctgtatatgctctgtacttttcaaccgatactgacgcgcatatatattctttttcattgcacgtcagcgtcagttcgggtattatttgccacttgtaaaatttttttgtagcttctcaacctttccgttgacttcatcgcccagcgattcttcgatcagtgcaaattccatgatgattgctgcaactcccagtcctgtttccttgtccttcaactcgtcaacagtgaactggttgccgtaaaccatgcaaatgcagtccagcatctttcggaactgttctgcggtgtaaagtccgcttttcttttcagttcccatgatgtcgtccctaacctccaaatattccatataggtgtcaacgtccatctttggcatttcatattctttgccgtttataattaactttcttttcattgtgttttgccctcctattgttcttttacgccgcttctgttggctcttgtacctttccgaaccagtttttgattgctgctgctgcgtccgtgtgttctgtcagaaggttgctttcgtcaacctgtgtttcaaagtttccatcacatgcgcgttcgtagaaactgcccttcagcgttgctgtctgtgttgtgaccttgtcttcctgtgtctgatagttgtcgtcatatccctgaccgaatgttccgacataaagccatacaaattcatacttgccattcagcttctttgctctatatccgacagcgacttcaggtgctttgtcgtccttgtttttcacaagccagccattcttgtataaatgaccgaacaacattgctttgtcctgcggtgcaagcgaattgacttcaaactccacgtctgttccttcgtaggtttcaactgtgtcctccactccatcatcgctgtaaatcttttcaacgctgaatttatcagacacttttcctgaaatagcacgcgcaagtttgactggtgtgcctgctgcgtatgctgtcgcatcgttctgtgttactggtgcgacataaatgtcacgaaacgactttgttcttgatctgatgatctgctttcctgcttcactcattcttcttcgtcctcctgttctgcttcttctgccgccatgaatcttgcggcattcataaatatttttgtatctgtttcaagattgtcatttgcgcccatgaatgcgaatcctgcctttttcataagtcgcctgattctcttttttaacctgatttgatctgtacttgaccagatgcacacttgcactgctgcaatctcgacttcttcgtcatcgtccgaatgttcgccgccgtagtcccccagattccacacagtcacatgcagtcccttgatgtctgcgtcataccagccctgctgtactgtgattccttctgcttccagcacttcaagcgcatccagtgtcttcttcacaatgtccatgtgtcatcctcccagcttttcattcaataacttctgatattcctgatctgctatcgtgtcccactgtccgcggcattcttccattgtgttgtaaaggaagtcttgtgggggctgtttcgttgtcccccattccacaaacttcatgtaaaaccagttttctgcatcgcccagaagtgtccagccgacttcgccgccctttgttgtcactttcgtggggatattatccgcagcatgtccagaaggtctgtaccccttctttcctgactttgaattgtctgccgaccttgccataactgtcttcattcgtggttcggtataatcaacagaacgctggaatatctgcttgtttgtttttctgatttccgaatcgcttgcaagtgtttccagtttgttttgaagttctttcagcccttcaaattcaaaagtcactttcatgctgtttccttccctgtgtcagaatctgacacatttatgtgacgcggttcgccttcagctgtacatattgcttgtcgttctgtctgaagtcccttgcaaaaatgttgtacttttcgccttcgtactccacgaagtagtccttcaagtgtgctgcaatctctttgaccttcttgcaatacctgacattatcgaacacgatcgcgtcttccagcctgatttctattgccctgtacagttcttttccgtaaaggctgccgatctcgcaccagcattcgtgatacaagatcggttctgtttccactcgccttccatcaacttttccgtactggtatttgtatattttgattcttgcgcttgacatatcacttcaacctttctttcaacatcatcgactgcaccgcgaatctgactttgtcgtctgttggtgctgttctgtccctgttgtcgtaggcttctttgacatacatgcagatcaataacttctggcggttcgtgagtgcttcaggattgaagtctttgatcaggtctgtcatttcttccagcactgctgcataaatcagtttgatcacttcatcgtcatcgtcatagtcgatacgacaatatgctttcagttcttccagttccatgtcttttcctcctctcctgaagcctgctgccattaaccagcaacaggaactgtgatttctcccttgatgactgcttcttcatcaaatgcctgcacatcgaatctgtcacgcaccttgattcctgtctggtctttcgcccataagtcgccagcttcggttgaaagttcgatgctgatcttctctcggtcaaataaagtgattgcttccttcaaatcgcccatgtagatcgggtatttgtacgctgacacgttgcttccgtctgacttaacttccacattcttcaacactttgttgctgactttcttgatcggatatacaccgaaaagaagcatctttgacttgtctgtcacatcatgctgcaaaatgtagtcgccacgctcgtccttgatcttgtcaaggtagttgaagcctgactggtttgtcagaacgattgaagaagatgcaatcgctggatcaagtgtcacattgaagacatccttcaagtcgtcatatccgctgattgccacttcttttcctgttgtgatttctgcaagtttcttcaaaattgcagcgtttcttgtggctcttgacttcttcgcgatccacttattcaggaagcccagaatattttctgctgtgtcctgcaaaagttcccttgtaacttttaagatgccgccctttttcttgatcttgtacttgatctgttttaacttcggcgtttcttcctctccgaactcttcgccttcgtcaacatcgtcccatggtgtcgaatctgcatcgacttcaaacactctgcttcctgacaatgtgctgacaggctcaacattgacatactgttcaaggtcatcgtctgttcttctcaactcatggatgtctgtctgaatatcctgcggtacagtgaagccgccgtcttcgtctgacttctctgacattgcgtccatgatcttctgatccttttcattcagttttgtcttgcgcattccgcagacaatacgattgacaaacgcgcgcgcgatgtctttcttggaaggtgctttgtccttaccttcagcctttgttgcttcgtccttgtcaatctggtctttgatgtcctcgtcctcgtcatcctctaagtccataaggatgttgaaacgatcctgcatgtccacaagttctgctttcgcttcctttgcttcctttgtctttccctcattcacaagggatttgatcgcgttcttcttgtcattgattttcttcagtaacgctcttgcttctttgctcattgtttttcctccgttttcttaaattccatacatgtacagatcgcccagaatttcttctgtttcgtctgcctgctgctgtcttgcttcgatgtcttcagctgtttcagtcttcattcctgctggcgcatgtttgaatctgtctatcatgtagccgacacatgctgcgactgcttccgctgattcatccactttgatgttgaaatagtctgaagcgcgacactctgatgcttcgctttctgacatccatgtttctgcattgatcagttcttcaagctggtctgctgtcacgccttcctttgcttttgtcatgtagatgtctgtgatcatctgctgacagctgtcaagctggcttataaccgccgcgaagtcgtctgcattgccccacgccattgtcagcggcttgtgaatcatgatctgtgcgcctgttgacacaacaatgtcatcgcacgccataaggatcacggatgcgattgacgctgcaattccgtccacaatgcctgtgatatgtcctttgtggcgtttcaaaatgttgtatatgccaattcctgcgaatacatcgccgccacagctgttgaagtacactgtcagttctgcattgttgtcaatgccgttcagaaagtctgtgatgtcctgtggacaggtgtcttctgatgtccacttgtcccacgccgaagatacaatgtcgccgtagatgtacagttcaacgccgcctgctgccgcgtcttttatctgcatgaagccgacattttcaatcgttcttttcgctcgatttcttcttgtgaagttcattttcttcgccatcgtcttcccctccttcctgatcggtgtcaggttcattcgtttcggctgtttcctgctcctgttcatcctgatccgtattttcgccgccttctgtgtttggctcatttataggattgtcaggatcgctgtcttcttcagtgtcctgttcttcagctttgtcatacgccgccccgactttcgtcagtggcacataagttccattgacaatcagtacatcgccgccttccatgtccatcaaatcaagttttcttctggcttcgtttactgtttcaatgccgttgttgattccttccttcagaatctccatttgtgtcttgctgtcggtacgaagcagcactttttcattcattttgaagtacagcccttcttccacttcgtcatccgataatagcttgtagttcacttcttcttcgtactgcttcagcacaaaaagcatcgtgtccacatagaatgacagctgctgcatttctgaattgctgtatgatgatttttcataatcattgatctggtttggtttaattccgaacgctgctgcgatctgaagtgctgaatactttttcaactcaacaaactgtgaatctgtcagcttaatgtccagcggtgtcagcttcatccccagcggcacaggaagaatcttgcctgtgttctggcttcctgctccgaagcgttcaaaagtctgtcgcagctttgtggctgcatcttcattcagttcgcctgtgtattccagcaccgcttttgctgtcaatccgtttttatataggttgttcaggaagcgttgtgattcaatcacgccttcgactgtctgcttcaggatgtattgcactggaagcccgactattccgttcaggcaatgcgaagtcttgaagtgcaagacatcttctgtcctgaatatgtattgttcgcccgaatattcatcgctgtacatataccagatttttcccttgcctgcgaaaatgcctttgtcgtcaataatgatctgcaccctgtctgacggcatgatccacatgtccagtgctttgtattcgccgccgtatttcttacgcttgaacttcctgcgtacatagacatatgcgttcccataatggtttctgttcatttccacggcgttccagaaggttgtcggtgtcataaaagggttcggacgttgcttcataagccttgcaatgtcgttgtctatcggctcactgatgcccttgtttgtcttctggtaaagtttccacggcatttttgcgactgtttctgacatcattttcaaacaagtgaagtatgtcacgtctgatgtcggcttcttgctttcactgtcgcgcttaattccaacccattccagaaaagattcatcattcagcgttgctgtatctgtttcaatattcattccgaatgctttcataattcctttgttcagtgttttccacatattcaaccttgcgcacctcccttctgtcgcaatttctctgtgcctgcaaaccaaatatcaaggtatctgttgacatctggcttgatttcgcccttcattgccatcatccatgcgtcaataattgcatccacgatgtcaattcgttctgtcgtgtattccttgtcaatcttgatttctccgaagctgttcgatgtcgtcttcgcgtttgcaatagaccacttcattgcttcgtttccgtcatgttcgacatgtcctgcttccagttccagtcggaagtccactgtcggatcgttcaattctcgcgctgactgtttgacagcaatgctgtcaaatccaagtgcttccaaatctgtcaggaatgcggaagcattgtgaggatcgtaacaaatccactgcacatccaattcatacagcttcacaatcttcttcaggtacgcaataatgtacttgtagtcagttttcacaccgcccattgtttcagtcacttcgaccagtccttgtctgatccatagatcataaggtacgcggtcagtcttgatgtgttcttcaacccttcgcttcgggatgaagctgtgtgcgtgtacgaagtagcatttgtcttcgccttgcatgaatgggatcacgattgcgattgatgtcaagtcgccgcctgatgacaagtcaagtccgacataagccttctgacctctgaagtcagccagtgtcttcttgactgctgcccttgtccagacatccatgtccttgatatagacatcattcgtccactgaatccacatgttaagctgcttgacgatgaagtcgcgcagtgttgatcctcccatttccttcgccgttgcagcaatcgggatcatgttctgcaatgcgtccctgtcatattccagaatcgggtttgccttgatccagttttcaggtgtccacatatcgtcagattcattcatctgcgcgatgtaaatgaactgtgaatcattgcttgcaacacccttcaggactttcacacagtattcatacagcgcaaaacacggcgatttcaggtcaaatcctgctgtcgtgatcacgctgatcagtgccgacttcattttcttgatgccgccttcaagcagcttgtacatctgatcatctttgtgcgcgtgatattcgtccactattcccagatatggtctgaatccatcaatcgacttcgtgtcgcctgacagtgccttgatcttgctgtgtgtgatcttgcagtcgattgttgaattgtgttcgtgaatcttgaagcactctgacaaatcgctgtcggaatttatgaacttcacaatttcgttgaagacaatcattgcctgatctttctttgtggctgtacagtaaacctgaccatatttgtacttgtcaaaattgccgtaataagccgccaaaataccattcaggaatgacttgccgttctgtcgtcccagctgtatataactggttctgaatcgtctgtgatgtccgtctttagttctccatccgttcaggcttcccagaatgaagcactggaatggatatgccgtcactggctgttcttcttcgccttccgcaatagtcagtgtttcagcgaagtcaatgatcctttctgcttcttcaacatcaaagtaatagcgatatggcgcagcttcagccgctttcatgtcgtctatatgtctttgacatgctgctttgaccagatcgccagcaacaatcttgtccgcaaggacatccagcgcgtattgtgtagttctatctgttgtcatgtgttcgccttatgcgaatttcgcgaacttgttttctttcggtgtttccttgtctgcttttggcactacaaggcgacagcggcttgacactgtcagtccgaagtccgcagccccctgacgacactgcttgaagtatctgtcttgaagtagcgcaagtctttccacttctccgttcacgacttcttttctgatcttcactggctgtccgtattcgtccagctgctttgttgcgatctcaatttccaccatgatcggttgtctgttcagttcttgcgtgactgcgatgtatttttcttgtgcgatgaccagtcttgcaagtgcatcaacatcaaggttcgatatgaggtcaatcgcacgaagttccttcacgattttcttgaaggttcttttctgtgtcggcgataagtattgcggtgctgtcactttgtccgcagccgctttcacttctgttcgctgacgttcttcaatttctgcttttgtcaggtgttttttgccttttgcttgtaccagcgcgatcggctgtcgttgtcctgccattcttctgcgacctcccttctttgctgttttccttgcggtgtgtcagaatctgacacgcaccctttttcggatgccctgatctggattttccgtggggagttttctccacggaaaaggggaagcgcgactaaataaacttaacccgatactttttcatactccccctgtcgccttccagtggcgttctatcaggtcatacaacatcttttgtgtcgctttttttgtctgttcatccttgctgtacaaggcttcaatgattccatggctgtgattgctcaatgggatcagattggttgcatcaagtcgtctgttccagtcgtcttcaataggtgtgatatgatgcaccatgtcagctgtctgtattacatgcagcacatagaaggcatatatatcaacgccatcaaaccgcctgattgtttcggctcttgtcttcctccactcacttgatacatagaaggctgctgtcttcttgtttcttcggtgtttgttgtattccatgtgtcttgactgctgccctgctgccttcgctgcacaggcttcacattcatctatattctgcggtattaaagccccacatctgcacttgtgaaataacaaacccttgcaccaccttcctactgctgcatatgcttcatatagccgtctgtataggctctatatgcagccgcttatatatgtcccttatatacgccctatatatgcgcccctgtcaggtatgcccctatataaagccttgtttttatgcttcctgtggatgcccttatataagcacccacattccgcaaataagagggcagaaatgcaataaaaaagaccgattcaacacttctgtgctgtttcggtctttctgtacaacatttcacgatactattttactttaggatgtcccctataaaaaccctcacttttcccacgcttttcccatgctttcgttgtcgtttccctcgaaaaaagcctttttcagatcgccttttttaaattccgttaattccgaataatttgacagacattttcttcaaaatcgccttgcaccagtttgaagggctgttttttccacaatcaagctgatccgcaatttcttcaaaggtcagtccgtcaatatagtgcattctgaacgcttcatacttgtacaatgtgccttctttcctgctttcggtttccagttcggtcaatgccctgtcaatgttaataatcatcatcgctgtgaccattttcgcttccttgacagatttcagcttcgcattttcgcccttcaggacgctgtatgccgcttctgtgacttcttcttcctccgtaattgcattattgatgtattttttcaaatctatgtatgattccatcaatcttcgtgtgttatacagtgtttttttcttctctgctctcttttcttcaattttgacttcagcaaacgccttccgcaccgcgatcctgattgcttccgtcatgtcctgctgcgtttcatcgctattttgcacattgcacaccttctttctactttttaggctttcgcctttcattccttctggctttttcaatcgccttcgccctgatcatcggcattcctttcattttgcgtctgttattgctgatcagctcttttcgcaactgcaatcctgtccattttgtcttcctgaatgcttctgtgattgctttccctacctgttcaaacgctggcttcaacttttcaaacgcttccgtgatactctttaccatttttcttcctgtttcctgcgcccactttgctgtcgattcaagcagcacttcgacttcttcttcaggaagtccgctgtattccgatacagctttgatcgtttcttcttttgtccattcaggatcaatcttcagtcctcttgtgactgctgccagtttcatcacatctgcactgatgtttctttctgctttcggctgttctgtcgtttcttctggttcgggttcttccacgactgctgccctgacagcttcctgtctgtcttccgcaatcaattcctgtgtgcgttctgcaattttctctgacagatcgtctttttcttcctcctgtggcttcgcacgctgtcccacaagcctgttttttatctttgttgcatattccttcagcttcatgtctttcactccttcctgcgcctttatgtaaaaggcaaatcgtcaacgccgtctggtatgttcataaaaccatcgccgctgtctggtgctggctgtggtcttgactggttgtcgcctgctgccgctttactttccgcaaactcgaccgattccacaacaacttccgttgtgtaaatcttgcgaccttctttgtttgtatagctgccagtctgaatgcgtccttcaatcacaaactttgttccctgctgtccgtacttctccatgaactgtcctgtctttccgaatgccacacaggaaatgaagtcagctgactgtccttcctgatctctctggactctcctgtcaaccgcaagtgtgaagcgcgatattgccataggctctgcgccttctgtatatcgtgtctgtacatcccttgtcagtcttcccatcaatatgaccttattcattcttctttgctcctttttgctctttgattcctttgactgctgccttgattatctctgcaacaatcaggatgatcagtgctatcaggactgcaatgaatcccaactgcaatataatcacgataattccacccagattgctgatcgcctgttcaatccatatacttcgcatgttttttctatctccttcgattcataatgtcttcataaagtttcttgtatgtgttgcgctccgtttcaagccgtatgatgcaatcgtgttcactttcaaccactgtatcgccgctgtgtgatgcccccccccgattgattttcgacatattccttcgtgtctgctcctgcatccagtttcaatgcgatttgaagcgcaatgtcgatctgctgcatttctctgtctgtcacacttccgatcctgttattcaatctttcaacactgactgttgtcggctgttcgcacagtgcttcagatacccttccagtcgttctgatcgtcacatgcgttgacatgtccttcttcggctgtgatgttaggaacacaacgaccacatcaccgctgtgtttgttcaggaagtcagctgatacaatgaccgctggtctgtccttcctgatctcgtttcctctctgccctctgttgttattgatataatacacatcgccgcgtctgacatcgaactgctgctgttgtcttgtgaaatgttcgtacatgctttttattcctccgtatattctccatatttttccttcagcatctttgcgcgtgcctgaatgtcgtctgcaagttctctttccttgtctttgtaagtctgcgctcttgccggctttcttgccctgattgcgttctggattgctgtctggtactgtctgcgcttctggactgctatgcgctgtactctgtccataatcgtgatcgtgtaatgtgcgccgcagatcgggcattcataatactgttcgatcacatcgtccccatgttcatcctgcgtgatcacttttttctgaatctctatcatgtcaggtgtgaatgctgcgttgcatttgttacagattatttcattcatactgcttccccttcctgcaattagctgaatcgctgaatcttaatcattttcgctgcaaatcttcccagaagttcttcttccttgctttccttttcctcttttgtcatttccttgcggttttctgcgaagtctgccattccatccagaacgtctgctgcttctctgaatgttttcgccatttctctcacttctttgctgtcctgcatctgcttttcctcctatgctccaaactccattactggattgtcaatataatctgctgcgactgctgccgcctgtttgctgtctgcgatcaggtcaggacatgtcctgcaatcctgaccattttcttcgcactgctcctgttcgtgttctgatacatcttcaaactgtttgtcatatatctttatccatccatcgtcatatattgaagtgtggcttgacatccgcagtccgtacttccttgcgatcggtctgtatatgtcataaaactgtctgaccgctgccgcatatccgttcatgtcctacaccttcagcggtttcacttcgccgtctttccatacgctgttgttctgctctttcatgcgttctgctgtttccgtgactgcggtgtctgaatctgacacatgaatgtgtgtctgtaagcacttcaaattcaagtatttttcaagaacttcaaccgcgtcccttgccgtgtagcatgtcgcgacatagtgtcctgctgctgccatatcggtcaagaactctttctgtgacggctggtgtctgcccttgtcatacttcatttcgatgtataagccgcaatatattcctttcgggtacggaaggcataagtcggacacgcctgacttcacgcccatctgcttcagctttattgcttcggctctgttcctgctgccgccgttcgggatatgatgcagccatttcagttcaggatatttctgcatctgccaagaagcccagctgatgacattgatctgttcggtatcttccgaacgcaacgcatacttcatgttcatcgcatttcctccatgattttcatatcgtgcataatgtcgccagtgaagcccagccgcttcattttcctgaatgccgtcaggtcttcaatgcctgacattttcacgatccagcctgcaagaagctgtcttgactttttatacatgtccctgacttcttccctgtgtgccgccagcacgtccgctgttcgtgtgattatgatttttctttcaatgctgtcctgtgcgattccttttcggtgtagttcttcttcgatcactttcactgcgtagatttccgctttcgtgactgcctgtcccagacacaatcttttttcgttgtccacttttattcctccttcgtttcctgtctttctttctctgccttcagctgcgctgctctttccatgatcgctgtgttgtagctgtatttatacacgccatgattccacaagttttcctttgctccctttgttccgtagttgtagaccgcaagaacgtaatatgggcgcacatcttctggaacttcctgcaaactgtcctgaatctccttcaggtaatcaatgccgactgtcacattctgatatggatttgtcagatcagtacagttcaggcgttgcattctttctttgtgccatttctgtgctatctgcatatatccccatgatgtgccgccatcgcctgaagcgttccagttgcattcgctttccctttcgatcagtgcgaacaccatttcgtaatcaacgccataattctgacaaacaatgtatgtgtatatttgcgccattactggaaacttgccgcctgctgccttgcattcgtctgatatttcgtgatagcagaatccttccatgtcttcgccgctccaatcctgtgacattgtattgaatggatattcttcatctgcattcaagtcactttctgtctgttcttctgcttcgctttcctgttctgttggtgtctttccctttgtgctgatcatgccgccgatcgcgaatcccagcattaccgccacatatattgtgatgaatgtgatcaggaaagctgctgccgtctttggcttgcgctgaatgaagttctttgccgtcctgatgaagttatgtgccgcatcgcgcaactgtctttttctttgtcttcttcttcgctgttttctgcttaatcttacttgtcgctttgtcaatcttttctccttcctgtggctgtttatacatccttgcgtatatataaaatctgccattcatgttgttgtatctgacttcatacgatgtcagcttgtagccgtctgctgcataccatttcttcagcttgtcttcaagatcgcatcgtcctgtcacaacttcgtcaatgtccttctgcttgaacttgtagtggtttttatgtacttcaggctttttcaatcctttgctggctttccatgccttttgatacttcccgactggcttcggctcttttcctttcttgtcagggtgcttctgtttcgtgatgtagttcgccattcctgacagtccgttttcgtccttctgaagtctgcgcacctgattcctgcgccccttcttccacttttcttcaaccgcttccagccccatgtcgccgtcacatacaaaatgatgatgccagcgtcctttgtccgaacactctgtcacatacacataacgcagctttgcaagccccttctttcttcgctcatagttcaagcgtcctatgtacagcgtcatgtcgtgttgtgcttccttcatgctgttcggcatgttgccgtctgtatatgtcagtgtcccccagatgtcattgtccgtgaagttcgcattgatcgtccgttcacattccttcctgctgttcttctcattcagatttctttgtgcctgtctttgcttcttcagctttgcttcgtctggtatctgctctttctgtcctcttctgaactctggatatatttcaatatccatctgctctgctgcctttatctccttagtggcatatattgatctgaccttgccttcattcagcatcctgcacatgttgtcttcttccaagtcagtcaacatcttctggtatgctgcttcatagtcataatctacatacacagctttcttccttctcttcatgtccttctttgctcctgttatagatatttatatatttctttgatttgttactatctattacaaggacgcgaagccttttgaaagtccctgatttattgacttttttggaagtctgctgtataattttttatagatgtgcagaccttaaaaagtcacaatctggatcgccttcggaagccgccaagctagtccgaaggctttctttttttgtccttcaagatgctttcgctgcctttgtcttaatctctgacagctgcaccctgacaccatcattcctgttcgacaggatcattgctattgcttcaaatattcttcttgcatctggtgtattcatgcgttttcctccttgtatctgttttcccagaatggacagtcttctgtttctccgaatctctccgcttcttcctctgtcatttcatcttctttgtcgcaacctccgaacattgttgctgttgtgcttccgtatggtacagaatcccagcaagcgttcttgcagtcataacatgtctttgtcggtctgctcatgcgttttcctcctacattccagcacccctgaatataactaccattgaagggaatggggctgcctgtttgctgtttccgaacttcaaacgccccttcacaaatctgatttctgatcggtgctgaatgaagtcgtgaaaatatcttgtgtctgttctcgctggtatcaacataacaacaatcgtgttgtcttttgtcccttctctgtatgccttttcaacccagtctgtaatcgctctaccatacggaggattgcaaaacacgcgataccccccccagtcctttgaaagaccattgtcttcctttgtgaaatacttttcacacttgtgattctgttcgttagcgcaaggatcaaggttgaaatgaaattcctgatcaagttctctgaagaagtcgtcaggtgtcgcccactgatctgtcttgctgctgtacatgacatctatgttcgccattgctttttctcctttcttgttttcttctttttcaatctattcagtggtaagatcgggcagtttcccatgacctttgtgtcacatgttctttcgggtgttgggatcacttcgcctgtcaggaagcacatgccatcttcttgcatttctaaatcagtcagccagaatggacagttcgtgcatgtgtctggcatgtgttccgcagctaccacgaagccatgttcttcaaatcctactatcatcttctatccctcaattctctgtgtcatgctcttgtctttcattgctgacatagccatctgcatccgcatcgcatcttcgtcagacatttcaacatcgtcttgcggtcttattatcatttcttctttggttgggaaaatcttgtgtttctgtacgaagcacttgaagaagaagtcgtgttcttctttccatgtttcacagtaaaattcatattcaatcccgatctgaattgcctgcgcttttgtacactgtacgccccgaatagttttctttccttttcctgatctgtagtgatacatctgattcaatccgtcttttcctaagactttgtatattgtctgtttcagcaagcgcaattcaaagtcgttgtgatatttccattcatggtcttccagcttgtcatctgacagatcgctttcttcaatgtcgtattttttcataagctgctgcaatttcttctgtgcgccttctttttcgccgcccactccgcgttctgcaagtctttgcagcttcttcatcaattcaactttcttttcatcaatcattgttcgttctccttcacatactgctttcgcaaagtccaaaataattttttcaacattcccccttctggtcatgtattatgctgtgtcgtttgttttcgcattaaaaacatccctaaaacctgttgaccatccatgtgtaattctggcagtacacacacgccgctatgttttcacagtattcatccgactggctttcagcttgccatcgtcaggatgaaggttgccatccttcatcgacagggcttgcgccctgtttcggctgtcagtctgatatttcgtcacaattcttgctgtattcccagtcttccgattcatcgtcaaaccagtggaatgtacagccttttcttccgtccacgtctattgttccgtagaagtagcagccttcgcagccgccttgcgcttcgtattcttgcagtgtcattccttgtcgtcctcctgctctgttgaatatcttgatattttcacaatcttctgtgtcggtatgtcatccatgtacatatatgctttgcaaccgaagaaggcttcgttgtgatcgtgtgcttccacaaccttcctttcttccagttcgacttcaaagatcgttcctgtttcatgtccgcggatcgcaacaaatcgtgctgcttcaagtggctgtttgcagatatacacgccgccgtctattccttttcggatcactccgtcctgcatgatcttttttgcattttcatgtgttgttgcgtggaagtatctgctgcgcttccctttttcccacaagtcatatttgctcatgatctccatgtacttcatatcaatctttgactgatcctgcgcacactcgatcaggtgctttctttctgcttcatccgtaaccttcgccagttcttcttctgtgaataaattctgtttcgtgttcatgttgtactttcctttcatttactccccgaccattcctgatcggggacatcctatgcccttttaggctgttttcactggtctgttttctcctgccgcccacatcatcatccctttgatgaccattctgtcgctgtcagacatctgcttcagcagcataataaattcgctgacatcttcggtctggctgttcaggtttttcttttcgttcgtaactgctgccatgttgtttcctcccttcgttctgtgatgtttatatgatccctttggttcttgcaaggttcatcgcgttttcaaggtctttcaatgcgtgcatctgaacgatgatgtcgtcccattccttctgatatgcttcatcctgttccttcgtccagttccagcaaccagcctgtctgtcacagtaatagttgtatttctgtctttcgtgaagttctgctgactttcttttgtcgctcacatactgaagcagcttgtcgaagttgtccttgatctctgcttctcgatccactgttttgtccgctttttcaagtgctggctttgtttcatattctgaaatattgatcctgattgtttctgctcccatattcaattcaagtgctgcgttcaggtctgatatgtggaagcctttgtatttgctgtctgttgatgttgtgttaaatattggatagccagcgcgaaggctgtcaggttcgtttctgctgtaatctgttgggaaaagtttgtctgcaagctgccacgctttttcctttgttgctactgtcgcgatcatgttcatgttttctgctcccttcttgtccttttttgtgtaagaaacaaaagtgctgtgtcatctcgcgcgattgattcttccgcttaacatcttcttgttttaggggtaaagtgttgtttggctcaacctatccgctttcttcaaatagtgcggtacactgtgctttcttgccctgatgttcctgctttcttcaactactttgacggatcatgtttattctgcacacgctctgtctgttatcctacagcctgaccgccatgtcacttgcgtgccgccctctcgcttcatccgttctttcctgctttcttctgttgcttacagttacagtatagatgcttacagtcactttgtcaacagttttttgttgcttacggtaacttttttattgacctttgcttgctgtcgtgttattctacaatcagaaaagcaaatatacagaaaggtggaataaatatgacaaatggcgaacgcgtcaacgaagtgcgaaaatcacttggtttaactcttgaaaagttcggggaaaagttaggtgtaacaaaaaccactatttccagaatcgaaaaaggtgtgaacaacttaactgatcagatggcaatttctatctgtcgtgaatacaatgtgaattatgattatttaatgtatggcgaaggggaaatgtttgacgaccttccgcagacaatcgttgatgaattgtgtgcgcagtatgatttgaacgattttgacaaggcacttgttgaaatgtatgtgtctttaccagctggaagccgtgaacgaatcaaagaatatatgaagcagctagtcaagaaggttggttgggataaaactgaataaaggaagtgatctattgaacattatttgtcttgatacagaaacaacaggactgaatcactatgacgatgaaattcttcagctttctattattgacggctctggtgcaatccttttcagtgaatatgtgaagcctgttcatcacgaatgctggactgatgctgaaaaagtaaaccacataagcccttcaatggtaaaaggctgtaagccgcttttatattatgcacatactattcaacgcattttagaaaatgcagacatgattgtcggttataacattcacggcttcgatttgccttttatatttaattctggcattgaatatcatgcaaaagaaaattctattgtcgttgatgtaatgcttgcatttgctgaaatttatgggcaaaagcgttacaacgaatataaatggcaaaagctgaagacatgtgcagaatattattcatatagcgaagacagctggcacaatgcgcttgacgatgcaaaagcaacactattctgcttttataaaatcttcggcgatgttcctgaagttcctgtgtatgcgactggcgtttatcgttcggttgataatattattaagcatgaagatcaaaagcctgttgaagttgttccaattcctaaaagtggaaatattctgatcggcttcggtatttttatgctattaggtttcttcgttgctttcaatcctgtgtgtattgtgattgctgcgccgcttttatattttggtttcaagcgtcataaagcatataaagaatttaagcaaaacaaaaggaagcagtgacctgaccagtcctacttccttttactttatccgtgtatgtatacatactttatgtatttatatatgcgcttcagctgtgcatccgacaacttattcagaagcgtgttgattctctttcggatcatcggcttccctcccttctcttgtcgggattgtatcatggaaattattggaataaaagaccgcttccagttatttccatatatcaggaaataagcgtcagaagcattgtcggcgcacagtttatcatttatattcagaatcaaacagatcagtgatcttgacatcaagtgcagctgctatcgcttcaagctggcgcagtgttggcgatgtgatgccgttttcaatcgtgttcagcgttgacttgctgattcctgtcagggcttccagctgcttcaaagtcaagtgtctgtctgttcgtgcctgccacgttaggatttccattgcgtcatcctcctagttttgattatgtacacgcttcaggcactctatacaaataaaaaaggaagccgtgaccagcgacttcccttgcgaaacattgaaacaaaatatatcgcggaagaccgcccacgatgatattatgtccttttacattctatcatatcaagccttctttcgctaccagaaagaaggtttttatatgtctttttttactccaaacccacaacttttcgggcttcgtgtagttaaatatatcagatgcagccacgatgatcaggtgcttcacggcgatacgcttgaagcacaagatctgattcttgaagatttcatcaaagtgaatcggatgatacttgttgacacattcattgatgaagccctgaccgcaagaaagaggttcaacaagcgaaaagagtttgtcaggttgttgaacggcgtgaaggctcacgacttcgacctgatcatattcacgaagctggatcgctggtttagaaatatcggggactatcacaagattcaggaaatacttgaagccaacggcgtgcaatggaaggctgtcacagaaaactatgatactacaaccacgaacggacgactgcacatcaacatccgtctgtctgtcgcacaggatgaatgtgatcgtgattccgaccgaatcaaagatgtgtttgcttataagctgaagaataaaacctatgtgtcaggcagccttccgcgcggtctgaaactggatgcggaaaagcatgtcatcattgatcctgaatggaactgctttgcgcttgatatgtttgaccgctttgaagctacatgcagcaagcgtgacacacagctttttcttcaggaaaagtataatattcgtgtctgctatgatacagttgcgcgatacctgaagaatccgcttttcaaaggtcagtatcgtgatgatcctgacttctgtcctgcgacaatcagtcctgaacgctttgagcgcatccagaaacttgcaatcaggaatgttcggatcagacacacacagcaattctatattttttcaggtcttctgatctgttcgtcctgcaatcattatatgtgcggtactgtcacatacagaaggatggctgacggctctgaaaagatgtacaagaattatcgttgcaatttcaaggcgcaatcaaagctgtgtgatcgcggcaaaacatatcgtgaagctgatcttgaagaatacatgcttgcgcacatccgtcctgctctgtctgattatatcgcgaagtacgaagtgactgctgccagcacagttcagaagaatcctgtcactgaaattgcaaagatagaacgcaaaatgaaaaaactgtatgatttgtttatggatgacctgatcgacaaggaagcgtacagaagtgaatatgacaagttcaaggcgcagatcgaagaacttcaaaagtgttcgactgctgcacctatgcgaagccttgacagtgtgaagaagctgctgtcggaagattgggaagccgtatatcatacattttcggatcgggaaaagaacactttctggaagtcgtttgttgaatcggtgctggtgtatgaggatggaagcatggacattcgttttttgtagtctttgtcgtactaactatgcaccgcctgtcggctcatctgcaaatataatttccggacgattcaccagtgctcttgcaattgctactctctgctgctgtcctccggataactgatttggcagattataaatccggttttcaatccccagcgttgcaataatatcatttacatacgcttcatccacttttcttccatccagccccagtggcagtacaatattttcccagacattaacagatgaaaccagattaaatgcctgaaaaacaaatccgatttttcttctgcggaaaacagcaagggcatcttccttcatcctgtataaatctttcccggctaaagtaacactgccttttgtaggggtgtcaagccctccaagcatatgaagtaatgtacttttaccggaacctgactttccaacaattgcgacaaattctccctgctcaatctgaatgtccacctgattgaccgctttgacctgattctcacctgcgccataaaacttacaaagctgcttggtttctaatatcacactcatgtgttgcctccttttcatcctacatccaaattgtatcagggcaatctttcatttcactttcaaaaaacgagcagaagtcttacagaattgtaagatttctgctcacttaaaatttaaccaacatatggtaattgaatcacaaacgtgcttccttttttctttttgccggaggttaccataatcgtacctgcgtgtttttcgataatttctctcgatagaaaaagtccgattcctgtaccactcttttccatgacctccttggaacttcctctgtaaaatcgttgaaaaattttgtgatactcattctgcggaataccaattccctgatcctcaatttccattcttacaagatcgtttcttttttgtaaccggataaatatttttgaaccacacggactgtacttgaccgcattatccagaacgttgatcacagcttcaccaagccaccttttatcctgcataatcgtgcatgtttccagctctttttcatagtcaaaaacgaattcaatttctttctcatccgctttaggataagtgcggttcacagcagatatgacagtatccataagcggaagttttttcttattaatctgaatcagtccagtttccatcttggatatttcaagaagcgactgcaataatgtctccagtccatccagagcactccgacaacggatacgaaactcctcctgttctgtggcacttaagtcattctgcatcagcacactaaaacacgtatccaaagctgcaaccggtgtctttaactggtgagaaatatcagaaaccatttctttcgtgttctccttttctgcccttgcttcttcctttatcaactgaatatgatgtccgattgcttcaagctggtcattcaatttttccagttctgcatgattttccgttttcagtaaatcatcaaatttattttcacggaatctgatcagaatttcttccaactggtctaaaattttctgatgacacgcatcttcttttttcttccaataaagtaaaaaagtcaaaagaagcacgcatatcacagtgcttacagcaccggtcaccataacctgatgccggaattgcgaataaaatgcattccctttattcccccagtatccatattgctccaataatcgccttccctgttcgttagtttcaatatccttatccttaagcaattccgaaacagcatccagcccggaaaattcttcctttgcagcaatctctgtcataagattaattttatatttataatcttcataaaacacatacgtggtaaagcaatttaatattgcaaacaataatatgacaggtaataccaaggagagcactactgtaatcttcttgtgatatctctttgtcactgccttacctcctgattccatatatatccaagtcctctgatattctttatatagaccggtgcagccggattgtcttcgattttctcacggagtcttctgatattgacagcgattgtattttcatccacaaaatccccttccagatcaaacacattttccaatatttgtgtttttgaaagaatctgtttcggattctgaagaaaaaaagtcagcattttcaactccgtttttgtcagactgatttcacgactctttatcaggactttcatttctcctgcgataaatacgatatctcccgaaatcatctttccggcttccgttttctcctgtctgcggcggaaatgtgcttctattttcaaaagaagtaccgaaagactaaacggctttgtaatataatcatctgcccctgcttcatatcccatgacctgatccatctcctgatctagtgctgtaagacaaataatgtatgtattataattgcatctcatccaccttacaaattccagtccattcccatccggaagattcacatcacaaatggtaacatccacattatgatcacttgcaattcttttcgcttttttcactgattctgctgaaaaaacctcatatccggattttttcagtgaaaatgtaattccacgatttaaattttcatcatcttcaaccacgagtatacctggcatagcatatgcacctctctttattaactatgtttcctcttctattttctccgtccctgagtacggataatgtgtcctcagtaagacctttactatgcaatccccttccctccatcggcattgcccgatttctactgtttatgatacactaaaattaccagaaaaaagcgttaaaaatccctgaaatcggcaagggattttcctcaaaaaaggatccattttgtccatataatcagtcctttctatcctttcgactgattatagtataccacacttcgcaccgcagaacaagtgttccattttctttttttctgcaattcatctcccacctgtagaggaaggagaattcttgctaacttttgttaaattcgggaaggctctgctgtccgctattctctgacacctgctgcatacgcacccatattcacatccaacagctttcgtgccggcggaagcatcgcattctcatactgcactctccactgaacagagggatccatatgtccacccctgaatccatcaatagaatccccggacttaatcggattgccagaagcaaaaatataggcaagaatctgataagcatgggcaacaaccgcattgggattcacaccatgaaaatgatactggacatccggcaaagacaacatgctcattcccacagaatccacaatcatatcctctgctccctgaatattgaacaatcggacattcactgcataataaataaaacgagactccatcggcagccggcatcggatcaacttctcccttgtaaacatcttcttggaactgtcaaatacaaccgccctacaggatggaaacagttccatcaacgcctccacatactgcaccagcatctcagcacgttccttataattcaagcctgctgccatcatatctgacgctgcaacctgccaggtacattgctgcagaatgtcatcacattcggggcaatcccaggtctgacttttctccatgccatccatcacaggcgccgttatcggcttgcatcccataatcaatagttgcggtgatatatctttattctcttttgcaaaatgaacactgtactgactggcagaaaagccaatgacctgtgcatcatagcaaaagcactcacttctgcccaaatgtcgatccatcacatcctgcaccatctcacgatccggcatctcacatttatcttccatcaacatacgaataccaaaaacagcatccggacgttccgtcacacattcaagattttgcttgataatgtctttatcttcttcaaatgatcccatcacaatacctttctattcttctaatctacacactgcccatttattataccttagattccgatgcgttaaaatacactttgcacaattatgtaaaaaaacgactaaacctaccgtttaatcgtttttcccgttcatgctgttttcagcagtcatgtaatttcaaaatactctgccacgaccacagtatcgcccaatagcctcacgaatgacctctatatccaatggttttgtaaagtgttcatccatcccggcttccctgcttttagcgatgtcatcaataaatgtattggccgacatggcaaaaataggcaccgttttggcgtcctcccgcttaaggctgcgtatccgcctggcggcctccagtccatccatcaccggcatcataatgtccatcaagacaatatcataggcatgcgtttctgactgttcaaacaattctacagcctgagcaccattccatgccctatcaacctgcatgtgctgttctttcagtaaaaactcagcgatctccatgttcatttcattatcttcaacaagtaatgctctaagccctgccagattcgctgtctcatctgcgtggatcgctcgatcgcaatgacaggatacaatgtcaatctccaacggaagtctgaccgtaaatcgggtaccgacgttcttctgactccaaaaatcaatggtaccatccatcagttcgatcattctcttggtaatcgggagtcccagacccgttccatcatacttgctcttgacgccatcggattcctgtgaaaaaggttcaaaaatatgttgctgataagcctcactcatcccaattcccgtatcctcacagacaaattcaaaccacgatcgatccggtctgtccgcaatctccctgcaccgaagccaaactctgccgccccgcctgttatacttcaccgcattattcagcaaattcatcaaaatctgctgaatatgtgcagggctgccaatcaaacatgaatgcgtcagcacctcattatccacattaaaatcaatcccctcttccatggcctgcacttttataactcgacagacgcgatccagcagcgcagtcatctgaaatggcttatgctccagagtcatctcaccggattccagcttgctcatatccaacacacttttgatcatctccagcaaatatcccgacgccgtcagtatcttgttcctgcattcctgttgcttcacctgatcatccggaaaagccccggcgattctgacatagccattgatagcattgatcggtgtccgcatgtcatgactcatcctacgcaaaaaatcggttttcgccatattcgcccgctttgcctcatctgccatctgaatcagctgtttctgatagttctgttcgacttcctgcagtctcttctcataatccgcccgtaatcgttcatactccggcattgcattgatcgtctcgttcatcctcattcaccccgatagtctcccttttatactctgcctctccgttctctcaaagcaaaaaaaagaacagtcccttttgattgaactgctctcatttcttcaaactgcgtatgaatgataataaaatctctttctcctttacatccagcccatcccacacttccagtatctcactctgttcatccgtcaaatccaaccgactcccatcctctgagaaaaattgtgccaatgtaatattgaatgcatcacatatccgctccagtgtgggaatggtagggatactcttctgacttaatatattgcccaatgcagtctgtgtcatgcctgtaatctgagacaaacgatacttcgtatatcccctcttttcactcaaccctgcaatccgatccggaatatactcttctacacccaagtaatgtacacctctcctctggtctatgatactaacattgtacccagaaatcagcatatttattagagatgtaaaacttgagtgtttactctatttcaatggagtattcatgtaaaaaaaagaaatttcactcagtccaataatttttctgtttttattataccagaaaaatatatgatataacagtccattttataaatttgcaaaagtatagaatttctctggtcaatccggcctgtatctgataaaatacattaatatacgtgaagattaaccctattttggaggcgaacatggagataattgctatacctttgattatatttttgctgatgatttttgttaccagtttcttcttcacaatgaagaaaaggctggtggaatgtctgatgctgattattctgattgccggaagtgcagcccttggttatatgctgattaccggtgtcatcactctgcccatttaaaacactgtcccggactctgatgcattactggcaaaatcaggggtgtcatacaattttcaatacgtatgacaccccatgtttttagtttttctcgtttctctataaattcaggctctgtacccaggctttgacatccgcctcagatacattgccattaagcatacgtccattctcaacctttgctccaggtacgattttcttcacaccctcgtctgtcttgccaagaccactgccgccggatgtcgcaaagagaataattctcttgcctgtaaaatcatagctttcaaggaaagtatcaatgatgctcggttcacgataccaccatatagggaacccaatgaaaatattctgatactgatccatgtgttcaactttgccgtttatggccggtcttgatgacgggtcattcatctcaacggtacttctgcttttcttctccatccagttcagatcggctctggtatagggaacttccggtttgatctcatacagatcagcccctgctgcctgtgccagaatctttgccgcattggcggttacaccacttgctgaaaaataggtcactaatgtctgactcatattgatacctcccattctgttctcatcttgacattgagcaatatttctattttgtattatagtcttttttgaccgcaatatcaatgttctagcctttattatctttcagaagatacttcactcccggctattgtttcaattcctgataccagctctcagccataccgctctcccgactgttaatgaaaatcgtatactccggcgtcttaatctcaagtatcggtgttacatccaacgtcacatacatctgacatttgccggtctctttgcctttaaatttacccagatactgcttaccatcggctgatccgttaattttatagaaattatcatccggcagggcatccaaaagctgtacatcttctatctcatttctgtcaaatgaaatattcgagtacccggatgtaatggccactgtattgtccgtcacctgcatgcgcacaggtgtaaagtcgattttcaaaaaccacagacaaaatcccgccatcatgacgatcaccagtccataaacaatgccggtgattatttttcctgccgttctgcccaagttcatcgtataattcatgctactgtaacggtcctgtataaacagccgtctgtcatccggattgctgtaccagccatttcgccagtaataatcgtcatcaatatacatcggtgctgtatcctgcttcaaaagtgcctctttccggcgcctgatgataaaaaaaagtacaaccatcacgattcccgccgccgattcaaaaagcgcatacaaccccagccagctccagtccatccattttcctgatagcagcgccccagcaattggccagaaagccattgaattacaaatactgctggccagaaatccaacggacgtcatacgtttctctaaacaatttacctgaaaattaatatccgaatgctcactgtaaatcttattgcccattttgtcgtaaaacaaagctgctcccagaagacagccacagacaagcaaacagcacacgaagataatccagctctctgaattgacagccatggcatgccaaagccccggtatcaccaacggcccacagagcacaatcaacggcagcgcatgacaaatcatcggcactgccatttgggctgttctggctgctgtctttgtatccacggcacttgtcacctgctcttcttctgatgtcgcctcataccagcccttttgcatcttcaactcatacatatgccggtgtgtctgccagactttgcccataacaccgatgaaaaaggccgtcatccacacagtccatgcaataaaaaagatggacatataccacattcccagcaaacaaatcaccgttccaatggcaaaatgccagcgataaaaagccttcatccatgactgatatttttcaatcatcgtcttcacttccggcagttccgctgcatcacccggcacatgaacaccaaatagcattccctgacgataggccactttgcagctgtaaaccaacttcgtaacccccaccatcagccaatccgtcaatatcataatgatcgttactatcattccggcaccatctccatttcctcaaaaatgtgctggcagaactgtataaactgtcccttatccatcccgcggattttggcttccgcagtcagaagctccaactcatcctccagtttttcctcaaaagcagcctgctgcgtgggatattcttcctccggtatacagacaatgctgccctttctccggtccgtctctataaatccttctgctttcaacagctgataggctttgctcactgtcatggcattcactcccaggtccgccgccatctgacgcactgtaggtagtatctctccctgttcaagttctcccttgccaatccccttgacaatctgattgcgcaactgcagataaatcggtatctctgacctggaatttattttgataatcatattccttctcctccttctatttgtattatacaccgcaatacaaataatacaagaaaaagattatcaaaatctttccgactctgataatctttcttaattccttgctattttaattcatctaccgttcccggcacaccattcacagctgcgttatagaactatttttcattcgaaatattttattcctctacatgaagaataagtttacccataatctgcaaaccatccatcagttcatgagccttccttgcctctgccaacggcagatccatataaaaatgtggttttatttcacccgagataatccgatccatacagatcttccgaatctttgccagacgttccggcttatcatcatatatatggaatgagaatgaacgaaccgccgatgcatgactggactgtttgataattgtatcgagctgatccagttctggactgccatccagccagttataaatgacaatcataccaaaatccgccagatattcgaactgacttgcaaaacgtctgcccaccagctgatcaaaaatcagatccaccccacggcctctggtgtaatccataataacttctttggcatcctgttccttatgattaaacacacactgtgctcccagagacttaatgtagtcgcatttttcctggctgctggcagaagcaatcacttcaattccctgcaaaagagctgtctggataaccgctgtgccgacaccgcctgcagccccataaatataaatagacttgccatccgtgcctcttccgatttcattcagcagcgcataggccaccatataattcaggaatcccggtgcatacttcagcggaaattcatcgggaaataccgtcacaaacttctgcggtacagcaatgtactccgcataagcgccgtatcccagaccactgttgacacagacgtgcatgccgggttcaatcccctttacatctgaacccactgcctccacaataccggcacattcattgcccacaaccagcttcggcggctttgcttcaagaaacggacagataccgcttctcataatataatccggttttcctacgccaatataaacattcttcacaagcacttcatccggccccggcacaggcttctcaatgtcggtgtaataaatctcctccggtcctccgaatctgtcaatcactgctgctttcatcaaattcctcctttgaaaatccccatattccatcgtgactacgggcttatcacaacttaataaaagtatacattaaatcttccctgccatgcaacgcttttactattccgattccttataatgactgtacgaaccattctaaaagtggtatcattcttatagttgcaataacctaacacaaggaggaattataaatggcttgtactacaattcttgtcggcaaaaaagcgtcctacgacggctctaccatgattgcccgcaacgacgactcaccgtccggcagatttacccctaagaaatacgtggtggttcaccctgatgagcagccccgcaaatacatatctgtcctttcccatgtggaaatcgaccttccggacaatccgatgcgttataccgctgtacccaacgcccttgaaggcgatggtatctgggcagccagcggcgtcaatgaagccaatgtggccatgacagccacagaaaccatcacttccaacccaagagtacttggtgcagacccgctcgttgtttatcagccggccaaagacggacaggaagaaatcaaaggcggtatcggtgaagaagacatcgtctgccttgtactgccatatattcacagtgccagagagggtgtcaaacgcctcggcagtctgcttgagcagtatggcacttatgaaatgaacggtattgcttttcaggatgcagaggagatctggtggcttgagactatcggcggtcatcactggatggcccgcaaagtgccggatgatgtctatgtaatcatgccaaatcagcttggtattgaccagttcaatctggaagatgctttttccgagcagaaagaatatatgtgttctgccgatttgaaagattttattgaaaaataccatctgaatctggctatggacggcgttctcaatccgagagatgctttcggcagtcatgacgattctgatcatgtttacaataccccacgtgcatggtatatgggtcgctgcctgaatccgcacacatggcgctgggacggtccggctgccgacttcacaccatattccgacaatattccatggtgcatggtgccggaaaagaaagttactgtagaggatgtgaaatatgttctctcttctcatttccagggaacctcttacgacccttatgccggatacggagagagcaatatgcgtggcgcctaccgttctatcggtattaaccgcaatgactttatgtctctgattcagattaatgataatcgtccggatgatatcaaggccatccagtggcttgcatttgcatccaacgctttcaacgtcatggtaccattttacgcagatatcgagacaacaccggattatctctccaacacaaccggcgacgtctccacagacaacttctactggtccagccgaatgatcgctgctatggccgacgcttcctataagaaatctgtcttccatattgagcgttatcaggaacatgtcctgtccaaaggacacgaaatcatcaaccgttatgacgatatgatccagaacgaggcagatacggataaacatcttgcattaaaacatgaagcgaatcaggctgtcgctgatatgctgaaagcagccacttctgatacattgggtaaggtgctctatgaactcagcaatgagatgaagaatgcttattccaggtcggatgcttaaatttcgtacgatttaattgatattttcgttcgtttttgttgtaataatatatatcaatcaaaggagggatatcatggctattactgctaccgaattaaaaaataaccttggaaagtatttaattcttgccgccactgaagatatttttattaccaaaaacggtaaaacaattgccaaactcacatctccctatcaaaacaaattagatacggtagatgctctttttggttctatcccagatacgattacatttgaagaagcacgaaaggagcaattgagtaaagtatgaaagtattaatagatacctgtgttgttattgactttttttgaggatgccgttatgaccgaaacagctattcgctctaaaatggactgcattattacacgaaataaaaaagattatgcaaaagcagaaattcccatatatgatcccatagaattctggaatctattgaaaaatgatgatgtcaatgatatctattaattctctgcccagtatatcttgaataattttggaatgtccaatctggcacgcaaaaagctgcacctgcagatacattcattctttaaaagaattttctgtctgcagacgcagcctttttataatttaccccgatagttttcaaactgatgaaatacgccaagtatattgacccaatcatcattgatatcaaaaactataatatttttgtctgtccattttcaatctgattctctatcccatctttttcctgtaaagcagatacgaatacaccgcaactggaatcgttgctagaaggatcagagctatcgttacaatttcaaactgagcaatcggcaaaaatccaactatgatctccaaaacaccacaaagcatccaaatcttgcctgcaaaccggtgagtcttatcccagttttcttcatcactcagtgtccatggcaacttgataccaattgtataattctggcggcatttcggcagatagttgccgatgacaatgaatatcacaccgagcagcagattggccataaaattgatattcacccatggccagttcagagccgtaccataaatcgtaacccccacaaaaacagaaataacagggcaaatccaaagcaccagtcgataaatcttactgctgatatttctccgtcgtggatcaacgcttgtaataatggcagcgaaccaatggcaggcgaatataacaagataaataaatgtcacgccccacaatttgctctggtaagaatcagctacgccttcactattaaaatgcaccggtatctgttccggcaactgatgccacagaagtagtcccaccagtacaggcagtaaaataatcagacttgtaatcattaaaatacgcttattctccttgatcatcagaagaacctcccttcaattccgaaagccacagcattacttcctctacgacagaagtgttcagcgtgtaataaatataattcttctccttcgtctcaaaaataagcccggctttcttcaaaatattcaaatgataggaaatcgtcgctcccgtcatatcaaaatgcgaaccgatctctccggcagacatccgtccttcccgaagcagcatcaggatatcccttcgcacagaatcagacaatgccttgaatgtctcagcaaatcccataaccaccatcctttttatcatttaaagctatttagaaatatttctaaatacagtatatatccgtcgcccttccctgtcaatagctatttagatttttttctaaataccagtcttattcatcttttctatggagaagttacaaataactgttgcggattcagcaatagatgtgcgataatagattttagagtccaattgatgcttatcggatcattcgggctcagactgattataactatatttatcatagaagaggtttttggaaatatgaatgaaatcattaatgcgctttatcaaaggaaatccgtccgggttttcacagatgaccctatcacagatgaagataagaaactgatcctgacatccgccatccaggcgccctccgccggatgccagctgctctacaccattctggatatcactgatcagaccaaaaaagatcgtttagctgacctttgcgatcatcaggctttcattgccgcagggcagatggtactgattttctgtgccgactgtcagaaatgggatgctttctataaggaggccgggatctcaccgcgctgtcccggtgccggtgatctgctccttgctgtggaagatgccatgattgctgcgcagaatgcagttgttgcagctgaaagtctcggcatcggctcctgctatatcggcgacattatggagaatgtcgaagaaatccggacactgctggcactcccggaatatgtctatccggcctgtatgcttgtattcggacatcccacagcgcagcagcaaaaccgtacgaaaccatcccgttttgatctgagtgatattgtctgcgaaaatgcttatcagacaaaagaaagcagcgatatccgacgaatgtttgcaggccgcaccggtcttcagggctatgatgcctggatgcaggctttctgcaatcgcaaatatgaatctgctttttcaagagaaatgaaccgttccatggaaatttatctgaaaccatttttagaaaaggaaggagtctccgaccttgaaaaataataaatttgaaattgatatgtgcaatggctccatcatggacaaattgatttcttttgccctgccgctgatggtatccagcatcctacagctgatgttcaatgccgttgatattattgtcataggccgtttcagcggcagccagtcattggccgctgtgggttccacaaccgcactgattgccgtatttacaaatctgtttatcggtatttcccttggggccaatgttctggcagcacgcttttatgctgccggaagacacaaggaaatgtccgaaactgttcataccgccatcaccctggctttgatcagcggtatcctgatggcggtcatcggtcagctttttgccagaagtgcccttgaactgatggcaaccccggatgatgtcattaatctgtcatccctgtatctgcgtatttatttcctgggcatgccgtttttcatgctgtacaactatggcgctgccatattgcgtgccgtcggtgataccaaaaggcctttatttttcctgatcatatccggatccgtcaatgccatcctgaatctgctccttgtcattgtttttcatctggatgtggccggtgtcgctatttcgacagttattgcacaaatgatctcatgtacccttgtcctgacctgtctttaccgttccgacagcagttaccagcttcgcttttcaaagctgaaaatccagcccctgtatatgaaacagatttttcaggtgggtgttcctgcaggtatccagagtaccgtcattaacttttctaatgtactgctgcagtcctctgtcaactctttcggttcgacagccatggccggttacaccgccgccaacaatattttcggatttatgtacgtttccgtcaatgccgtcacacaggcctgcatgagttttaccagtcagaattacggtgtcggcaagtataagcgaatggaccgggtactccgggactgtatgattctgtccgtttccgtatcgctcatcatgggcatccttgtctatgttttcggaccggaactgctgcacatttacacttctgaagaagatgttatccaatgcggtatggaaattcttacctacaccaccctgacttacttcttctgcggactgatggatctgttcccgggtgccctgcgcggtatgggccattccactgtgccaatgatcctgtccattgtaggaaccgtgggcttaagaatagtatggattttcctgctgttcccgcacaaccggtcactggatttcctgtttatttcctacccggcttcatggatcattacatttatcatgcagatcatctgcttctactttgtaagaaaaaaagttcatcgggaattaaaggcacattttgccgtttaaaataaatacatgcatcccctcttcaccatactttcggcaaagaggggatgcattatttcatcattttatttttatcatattattgtaactgttcagagctaacctccaaaatgctacgcattttatacctgttttttgaaattttgcttggctctgaacagttacatattattttttattgtagcttatatggtacttattaatttttcgggatatcgaagactgatcaacttttaaaatctcagccgccttataagtattatgtgtatggtcaagcacactctttatcaacgacgactcaaaattctccagacaattctttaaagaaaactgctccggatacgcctgatataatttttcataatatgtcaaatcttctattggaagtacaaaatcagccggaacctctttaatagggaaaccaacactttctatcatctccgagagataaatattcttcggatctgtcataatcaccagcttctccaaaatatttctcaactctctgacatttcccggccagtcatagcttaacagtatcttcatcagttccggtgttgccattttaatgacaccatatttttctgaaaagcttctgagaaactgctgtgtcaacggaataatatcttcttttctttcccgaaggggcggaatattcagcgaaataatattaatgcgataatacaaatcgcttctgaatgttcccgtagcaatgcagcctttcaaatcaacattcgttgctgcaataaatctgcacttcagtgttctctccttcgatgaaccaattcgataataccgttttgtttccaacactctcagcaattttccctgcatggacagaggcatcgaattaatctcatcaaggaaaatcacaccatcctctgccgcctcaaataatcccatcttgccgtttttggatgcccctgtaaaacttcccgattcatatccaaataattccgattcaaataaattttcaggaatggaagaacagttaatagaaacaacctgttttgaggccagatgactctgactgacaatataatcaactaaaacctgctttccagtacctgtttcaccggtaatcaatatggttgtatccatatctgcaattcttttagccatattcaaaatggatttcatattcggattcacacagataaatggtgaagaatcctttttcacctcctctatgaaatcttccctttgttcatacagcccatcctgataggtacgctgaatatgatctaaggtctgcatttcaacaacaatatactgaatttcaccttcatcatccaacaaaggcgtagccgtccccaattgtctgtaggaataacccgttgtgatcttcacctcactgatgcgtgtgatcctccgctttgtctcaagagctctctgcgccaataactggtctttattgacatcgactccctgctttttgaaattaaaaacattcaaagatagcgcatattcttccgtaccacccgccatctccaataaagcctgattcgcaaatacaatattgcccattttatcagcaataaatattccttcatgaagacaattcatcatgcgcttcgactcctcagttaaaagcctccctaaatcaaattccattttcctctccccttattgacctatccccatacgtacaatgtttctcttttgtgacattatagcattgttcttgcaaaaatacattgttttttggcaaagtttttttaaaaatgcatttctgcatcattttttcgctcaaattgtcgaaaaatcctttgtttttcagttttttatgttggcacacaacttgctatttattaaggtgtaagaaaacataagatgttcatctataaggtgaaacaacgtaaagggaggtattttcatgagtaacttaaaaaacaaagtcattatcacagcagcattaacaggtgcattaacaccaaagggttacaaaattcctgaaacaccggatgaaattgctgaagatgcttacaaatgctggaaagccggcgcatccgttgtccacatccacacacgtgccaaagatggcctcggtgctatggttacagaagattttctcgaaattgttaagaaaatcagagcttacaaagattgtgatgttatcatcaactgtacttcttccggttccacacctgcacatatgtgccctgatgagatgcgttacagacatcatgaactttgccctgagattgaaatgggttctgtagattcaggttccatgaactttacaccaattgccgtttttgaaaatagtcctcagttccttgttaagctgatgaccgcttataatgaacatgatgttaagccggaatttgagatttttgatcctggtatgctgaccaatgtcaattactactacaatcaaggtctcatcaaaacaccaatgcatttccagttctgcctcggtgttaccggaggtatgccggcaacagttgaaaatgtagaatatctttcaagacatattcctgaaggctccacatggtctgctttcggtatcggtgccggtcatatgcctgtcctttacacagccatcgccctgggcggtcatgttcgtgttggtctggaagataacgttgtctatggttttgatgaggacggcaaaaagattatcgcaacaaatgagatgcttgttaagcgagccgttgatgcagttaaaacatttggcaaacagcctgcaactgctgcagaagcaagagaaattcttggtctgaagccacttgtaagataataattattttattcaaaataaatgaaaaaggttaggaaagaggtaataaaggagggttacaaatgacagcattaggtattatagggcttatccttggtattattgtcatgattgttttcgcttactggggattaaatgccgttccattaagcttgctggctggcgcagttatctgtattttcaacggtatcaatctctggaccggcttcgccacaagttgggccggaggccttgcaactgtattttcagcttactacattttattctttgtttctacatgttttgcgaatatcatgggtgaaaccggtgcctgcaccgcgattgcctataaattcctcgactggttcggaaagaagcatatcatcactgttttatcactgttctgcttccttctctgctacggcggcgtcagctttttcgtatgcatgtttgcagttggaccgattatgttcaaattatttgaagaattgaatattcctcgaaaactgaccatcatcccaattgctatcggcggtgcctcatggtctatggccgttccaggcagtacacaagttcagaatgttatcccaactggactcggaacaacattaatggctgcgcctctcctcggttttatcatggccattgccggacttgcaatcagtattatctatacagagcatatttataaaaaagaaatggcccttgttgccgccggcaaagaagaaggctgggataaaaactggaagagccctgtaaaaggtgagttgaaatccagagatgaacttcccggtacagtatcctccttcctgcctctgattttccttgttgcttttattgtcatcggcagcttaacaaaatttatctctaatgcaacgctgctttcctgtctgggtatggcctttgcattcatcatttgccttgtattaaaccgtaaatatcttggaaattcactggcagctatgtttaagagcttatttgccgacagtgcaggcgcagctgcaacatctgcccttgtattaggtgccgttgtcggtttcggaagcatcgttgcatcagcacctgccttccagaacattctgacatggctgattggattggatattcctatttactggaaaggcgttatttcaaccagtgtcctggccggtgttacagcctctgcttcatcaggtctgcagttatgtatgcagtatctgggtgattattttatccagtccggctgtgatcttaatgttctgcaccgtttaatggcctttgcttccgttacactggattcgctgccacattcaacaggctgcttcctgatgtttgcttatctgggcgtcaatcataagctcagttataaatatgcattctggatctgtactgttttcacattaattgttacccttgtagcaactacagttgtcacaattatcggattataaatacaaatgacataactttaaagggggttattgactatggcaaattataaagcagtttttattggtacaggtatgatcggtgccggccttggagccaacgcattgctccatgattttgatgttacactttacgatgttgtaagtgaagaacagattcgtaaaaatttaaaaaatatatttgatattctcgttgaagccggtatgacaacccaggccattgcagatgagaaacagaaaaccgtcaaaatttccacggatttaaaagaagccttaaaaggcggtgctgatattgtccaggaggccgttcctgaacgtgaagacttaaaacgcagtatcttccgtacagttcaggaaatacttggtgacaaaacgattattgtcagcacaaccagccattattttccaagtattctccaaaaagatgccttatatcccggcaatatcttagttgctcacccttataatccatcttatattctgccattgatcgaaatatgcggcccagaatgcccgaaagatgtcatcgacaaagttgttgaagtttatacggcaatgggaaaggctccgattgtatgtcgaaaagaagtggacggttttattgtcaataacatttcctggaaagcactttttacagctatggatatcgttgaacagggtgtttgctccgttgaagatgtggatcgcgccatcatgttcggtccaggtatgcgaatggccattctcggtcagatcatgtgcatcagcctcggtatcgacggcggcatcgcaaaaggtcctgaaaaatacggcctgcctcataagccaatttacgatattgccggaaaaggcgtggaagaagaaattgccaaccgtgatccggaactcggtaatacagttgaaagtttaaataaatggcgtgataaagcactggttgaaattcttaaaatccagaaaatgctttgataaaggaggctcacaatgaaaagtaaattgaccgacgttgtaatcgttggctacggcagatctgccgtagccaaaagtggaaaaaaaggcgctctgcgtgaaacacaccctgttgaccttggcggtcttgtcctgcgtggtgtgcttgataaaatagaaaatctccctgatgaagccattgatgatattatcgtcggatgtgcccagcaggaaattgggcagacattcaatatcggacgtcttgtcgcacagcgtgcaggcctgccagatagtgtaggcggtatgtcctgcaaccgtttttgctcttccggacttcagacaatcgccattgccgccgcagaaatacaagccggtatcgctgatgtcattgtcgccggcggtgtggaatccatgactgctgtgccaatcagctatgaaacaatgaaaaaagccatcaatccatggttatggaaaaataagcgtgccaattacctggatatgggatccaccgctgagaatgttgctgcaaaatgtaacattacccgtgaggaaatggatgcttttgctgtagaaagtcataaaaaagcagcggctgcccaggatgccggtcatctggctgcttccattattccacttgacggtattgacccggaaggcaatcccatcgtttttgaccaggatcaggggattcgccgcggtacaaccatggaatccctggcttctctccagccttgtttcaaaaaggatggcgttgtgacagccgctacgtcctcgcagacaagtgatggtgccggctttgtcgtgttaatgtccgctcagaaagctgccgaattaaatattcagcctattgcccgctttatcggattcgcaacagccggtctggatccggcttacatgggactcggaccgatttacgcggttccaaaagtcatggatgaaaccggtctcactgttgatgatatggatgtcatcgaactgaatgaggcctttgcagcacagtccattccatgtatccgcgaattgcatttagatcctgccaaagttaatcctaatggcggtgcattggcactcggacacccgcttggtgctaccggtgctatcctctcatgcaaacttttagatgaattaaaacgcacaaataaaaaatatggtcttgtaacaatgtgtatcggcggcggtatgggcgcagccggcatctatgaaatgtgctaaattctaacaatcaggaggcgatcatcaatgaaaatcggaattcttggcgcaggcgctatgggcagcggtattgctcaggtctttgcaatgaatggcaattactccatttatctctgtgatctcacagaagaacttgctgaaaaaggcaaaaaaagtattgataaaacacttgcttatcaggtcaaaaaaggaaaaatgacagatagtgaaaaaaatgctatactagacaggatcacaatcggcacaaaagaaatctttaaagatgccgatctgatcattgaagctgtcaaagaaaatatgcaaataaaaaaagaaacctttaaagaactggacagcattgttcctgcaaactgtatgtttgcatccaatacgtcttccctttctgtcaccgaaatgagcaatggcctgagccgtcctgtcatcggcatgcatttcttcaatcctgcccctgttatgcagctggttgaagttatccgcggcgaactctcaacagatgaacaggtcgccaaaatcattgaaattgccaaagatattggcaaagatcccgttgaagtcaatgaatccgccggatttgccgttaacagaattcttggtccgatgttaaacgaggccatttacgaactctatgaaggcgttgcctcaatggaagatattgataaagccatgcgtctgggcaccaatatgccgatgggaccattccagcttgcagactatgtaggactcgatatctgccttgcactcatggaaaccttgcagcatgaactcggcagtgacaaatacagcccgtgtcctttgcttcgcaaaatggttcgtgccggcaagcttggtgtgaaaacaggtatcggtttctatgattacaggagataaatagaaattatggaaatgacaaataacgactggaaaaagaaactgacatccccggaagaagctgtgaaactggttcatgatcatgaccgtatctttatcggctttgtttccaatatcacccctgtgctttccgatgctttatgggaaagacgtcaggaactcaatgatatcaccatcatcagcggacttctgctaaggccgacacggctctacaccgaacctgcagaaaatcagccatttaaaatgctctctctgtttcttggtccattcgaaagaacggccatgaaaattggccggccttctgcatttacatcgctgcacctgagtcaggttgacgattggtttcataatatcggcaaagtatccgttgtatttatatctgcctctatgcctgacgaaaacggcaatgtttccttcggtgtttccggcggcagtgtctatcgttttctccttgacacagccgatagaatcatattggaactgaatcctaatatgccttacgtttacggtcaggacaccattttcaatatcaaagatgccgacgctattgttatgtcggataaaccaattcctgaaatggccgaaggtgaacctgatgagataacggagaaaatttcagatcagattgtcccgctcatccctgacggggccaccatccagcttggcatcggtggtctgtcctctgcgattggaaacaaattgaccgacaaaaacgatctgggtattttttccgaaatgctctgcccttccatggtcaaactgatgaaaaacggaaatgtcaccaataaatacaagggatttatggacggcaaatctgtttatgcctttgctgccggtgataaagccatgtatgacttcatggatcataatgaaaatatctacaatgcttatttttcatttgctaatgatccacgaatgatcatgaaaaataaaaaaatgatttctattaacaccgcaatggctatcaatctttatggagaaacagctgctgacgccatcggttatcatcaatacagcgcaatcggcggtcagcttgattatgttcgcggtgcccaatggtccgaaggcggcaaatccattatcgcaatggattccagttacataaagaacggaaaaagatacagcaaaatcaactttacatttccggaaggtacaccaatttcaacaccaagatctgatatagaatatgtagcgactgagtatggctgtatcgatctgaaacacctgacaatggctgaccgtgtcagagccatgatctcgttggcccaccctgactttcgggacgagctgacagaaaaagcacgacacgtcggcctcatctgatatcaaagaaagtaggaaagtgtatgatcaagcgaatagcaattatgggatgcggatctctgggaacaattttaggtgcttacttaaatcaagcaggtttagacgttatgatggtggatgcctggaaagagcatgtagacgttctcaatcgtgaaggagcaaccgtcaccggcggtgttcagatgaacgtacctgttaaagcatgtactcccgatcagatggatggcatctatgatctgatcatttacatggccaaacaaacatttaatgacattgccattcctcaaatgcttgctcactgtggagatgatacaatcatctgcacatgccagaacggactcccggaactggctgttgccaaatattatcctaaaaacaaaatcatgggtgcgactgttggctggcctgcaacatttgtcggtcccggtacttcaagcctgacatgttcaccggatgccccgacttttgaattccatcttggaagattaaacggtgaacttgacgaaaaagtttatgaagttcaggctgtcctggcgaaaatgtgtcccggacgtgtcaatctaaccaaaaacctgatggctgaccgctggtcaaaagttatgatcaatgcaaccttttcaggtatgtctaccgtatgtgcggataccttctattatgttatccatacggaacgtgctttaacctgtgctgtgcggattggccgtgaatgcattcgtgtctgccatgcgatgggcattacattgccttctatatttgggctggatttcaacaaactttttgattacaacgacattgccggtcagaatgcagctattgctactgttcaaaaggttttcgatgccatacagggaaaagcctccatgctgcaggatcttgaaaagggcagaaaatgtgaaattcgattcatcgacggcgttgttgccgatgaaggcaaaaagcttggtatcccgactccatatacagatgctgttgttgcaattgtttctgaaatcgaagataagaaacgcccgcttcaaaacaatctggatgccatgccggatttacctattgcataatattataatatgtaacacctatacacctctcatttaggtgctgtctattgccggatacgcaagaggcggcacctttttgcagtcaaaacacacgtacagctttttagatataaatgtgtttcctactgagccaacataactacagttagtaaaaagtcaaaaagaaagctgccacttcaagattttctaatctttaaagcgacagctccctgtttttagttctgaatcaaaattttttcttcctgcagcatcggatagcgcaccagcatctctccattcagattttctttctgcatatccacagctgtgatctgatgattcgtataagttgtataataataaatacctttgctgacattcatgcaggcagtgtaaatcgttatttcataatggccttcggacacttcgcagcagcctctctgctgctccaccgatcccataatatgaaagacctgattgacactttctacttcagaattcccggataaagcattcattttcacaaaagccgcacggacaaaacgcgaagaggaagacaagtcacccggcaatccaagagcgcccatgcccctgctgtaactgccaagatccaatttgtccgaaaagttgttggatggctgtttcggtgacagtgccatataatcattcagcctgaaaagctgcttgtcaaagggcggattattcgtcatcacacccaccggattatcataaatatgcaggccgtctttcatacactccatggtaatagcctcattggcatccgcgatcagccagtgaagctgggcatttggaaactgcggactgaaaaccgtatccacaatattcaacgtctcaaccagttttctcacatccgccacactggcacactgccccaacagccatggaatcagctcaaatactgcaatattatccttgtcatccatcggatgaccataagcagcattccccacaaaattcaaacccgccatagcaagtcccttttcattggccccttcataataaaggggataattctctgccacgtgagccatgccaatcatcgcataatgatcctcaagcaccgcaccatgtttgaaatggaagggatagtatctcggtgtaatggtgatttcttcaccataggaaaactcgtaatccaaagttcttcccatataaaaatcttttgtttgataagttgccgctgtacacatgcagctgcctcctttatacgattgctttaacagctgccttcaaatcagccgctgctttcttaatatctttctgtgcataaatggcactgatgactgccacaccgtcaatgccgctgcccgtcagtttgacaacattctcctgtgtaatgcctccgatggctacaacaggaatggacacagcttcacagatggcttttaatgtgtcataggaaacttctgctgcatcatccttggaagttgtcggaaagactgcaccgacaccaaggtaatcagcgccgtgcttctcagccagaatagcctgctccacagtctgtgttgaaacaccgatgatcttgttcgggcctaatttggcacgtacatctccggcttccatatcgctctgccccacatgaacaccgtctgcattcatggcaacggcgatatccacattgtcattgatgataaatggtactttatattccttacagagtttctgcagttctttggcttcttcaaggaaatgagcctcatccagcgtcttctctctcagctgaagaaatgtcacaccgccatccagactttctttgactacttcatataatgtccgtccgtttaaccaatgacggtctgtaactgcatacaataacaaatcttctttagcgcacttcatattttgcccccttatctaaagttgatgcatccatattgtaaactgcatcgataatacggttacggtaagtagagttgccgtcgccttcctgcattcttccccatccgatctcacctgcaagacccatggtgcatacagcagcagctgctgcttccagatgattgtcaggattcgccaccagaaatgccgtcatcatgccggacagctgacagcctgtacctgtaatcttacccatctccggtctgccattgcggatcacatagcatttctcaccatcggatacaagatcaatggcacctgtaatggcgacaatggaaccggattttgctgcaaactgcttcacaaactgaaccgcctgatccagtgtttccttagtcactgcatctgccacatccgcgtccacgccctttgtagtgccgctgccgagagccagtgtcttaatctccgaaatattgcctctgataactgtcagtttcagctgctccatcagctgaactgctgtgtttgttcgaagtgcagaggcaccggcacccacaggatccagaaggattggatgattcaattcattcgctttccttccggcgcggaacataccttcaatactactctttgtcagtgtaccgatattgatattcagaccaccgcagatggatgtgatatcttccacatcttccggctccgcagacataatcgggctgccgccgcaggccagcagtatattagctacatcattgactgttacataattcgtaatattatgaacaagcggaacattctttctcacattctcaatacaatttccaagcattttcttacgctccttttaatctttgcttcattttccaaaattattcacaagttttctacctgaatatccggaaaacaaatagcggatatgccccgaaagacatatccgcatcaaaattctcattcgctttatgcgacgatgtgcatacatatccctacgttggcatgatccaaatcaggttatgggtccaggcggctcagcctgttctcagcctgctccggcaggctccccgctgtcacactctattatagcgtcatcacactgtatttgcaaggataacacaataaaactccatctccggatgggcattcaggattttctacatgctgataatgcctaaaacgttggcaatagagctgagcaggataacaatcagacaaatcggtgccagatatttcaggaagaaattatacaatttctttctgccaaacttggatgactgttcgatttctttcgcaatcctgtcaaagccaaccactttggtcacaaggaaacatgtagccagcgctgccagcggcatcataactgaattcgtcataaaatcaaagaaatccaggaaattcatgccgaatatcctgatgaaatcaaggataccgtatccaagagatgatgcactgccgaatacgatcatcacaactgccatcaagagactggccttaccgcggctccagtgcagctcatccatgaatgtggaaacgcttgtctccatcagtgaaacagcacttgtcagtgccgccagtaatacaagcacaaagaacagaataccggcacccgttccgatgcccatactggcaaaaaccttcggcaatgtaataaacatcagagaaggacctgcattcagcgtctccggattaccgcctgagaaggcaaaaaccgcaggaatgatcatcagacctgcaagaatcgcaatgcctgtatcaaaaatctcaatctgtgtggtagactgttcaaggtcaatatctttactgatataagaaccatacgtatataaaatacccatggcaatggaaagcgaataaaacatctgtcccatggccgctacaactgtcatccatgagaaatgttcaaaattcggaatcaggaaatacttcacaccctcaatggccccgggacgggttacagagtaaatcgccacaatgatcgccagcaccacaagaatcggcatcataattcttgacatcaattcaacaccgttcttgacaccgccgagaataatgataaataccaatactgcaaacacaatgaaccagagttctgcctgccaggaatctgaaataaatgctgaaaaataaccgtcttccgctacaacctgcaccttgccgctgagatatgccaccagatacttaatgacccaaccgccaatggtgctgtaataaggcacgatcagcattggaatgactgcattcatccagccaccgatcttaaatggtgccgttttgccaaagaaggaaaaggcccccaccgggctcttcttcgtcatacgtccgattgacgtttccgacatgatcaatacataaccaaaagatactgtcaaaagaatatacaccagcagaaaaattccgccgccatactttgccgccagataagggaaacgccagatattaccaaggccgaccgctgaaccggcaactgccagaatgtagccgagtcttcctgagaagcttccccggtggccaccatgttttgtttttttgtcgtgatccatgatacaccccattaatgtttctttctttatatttatagatagcattttattttaacatgtttattcaagagtcgcaactcatcgggcagattctttttatttttttgacattctatgttatgattagagtcagaaaggaaatatcacaatgaacacatactatcccatccatattttagtggctgtcccttgtccaccatcaatccgtgatcgtttcaatacacagtttggctcacaatgtcattttacctttatcaattccagtcagaccatccctgaatctctgcttcgccacacagatgttatcatcggcgaacctgacgaaccggatcttctgaaagcgcctcgtctgaaatggctgcagctgacatgggccggcgcagacaaatacgcacgtatgaaacggttgccttcccatctgacgatcaccaatgcttccggtgcttttggtatcattatatccgaatatgtgattggcactattattgcactgtatcgatcattttcagtttattcacatcatcaggcagctcacacttggcttccatctgacaattgtggcacgatttacaaaaaaacagtcctgattctcggcactggagacatcggttcttcccttgcccaccgtttaaaagcttttgatacatccatcattggcttccgccgccatccgaaccatagagcacttccggactttgatgaagtcatcgggtcagaccagttagatctcaaacttaaaacagcagacatcgttgtcggatgtctgccaaatacatcagaaaccatcggcctctttgatgaaaaacgtctgcgtctgatgaaaaaagaggcattgctgatcaatgtcggccgcggcagtctgattaaaaatgatgctttattgcatgttttaaaagaagggcacttaaaaggggttgctctggatgtatcagaaactgaaccgctgcctaaggcctctccgttatgggatctgccaaacgtcttcatcacccctcatatcgccggtccaagttttggtggcaacacagatgttgaacaggccatctggaacctgtgttttgaaaatattgaacgctttcttgccggtcaggtactgaaccatatcgtcgatttaaggcaaggctattaattgttatttctcaatatcttccatagagatgagtttctgtgacacttccacctgagaaaaacgaaggccatggtcctcatattcaaattcgccccgctggttatcaatcgggtcgatgcgaagccattttttctccggtacaaaagctttctggatttccgagttcgcaggcattcgaaaaacatccagattaccgaaataataattccagcgttcaatttcgcctgcgcgccatgcacttccgccaaaagagaggtctgcaaatacccatccgtaaggcgcaacatagaactgcgcccaatcatgacagcctgtatagtagtctgtcgcatacagcccggactgccagcgtgccgggataccggacattcggcaaagcgtgataaaaagaagggcctgtacaccgcagtctccttttaaattgactgcacagtattccggaatgcactcaattgtaaaatattctctcacaaaagaatacatgacctttgtcgtcacaaaatcgtaaaatcggcgtgccagaatgaccggattcgtctcatcaccggccagttcatccctcagttcccttaaataaggtgtaaacatgatatgcggcgactgttcttcaagacagaaatccggctgttcaccggcgacacgcttcggatccagttccacataattaatatgataatcaaatgaatactccaccataaattcctgattcggctgcagttctgtctcaaagtaaactgttctctgcgctgcatcttccggtgcaataaaagtaatctccggattcgcagcatgaatctgtacatttgaaacctgctcatacaccttcggaatcggcaaatgtacagaaacttttcgtccgacttcctcgaattcctttttggccttaatagttgcacggatgcgtgtatgaactgttctgcctccgtgttccttcatataatgaacattcccattaagcagcttctgtttcattgcattctctttttcaagttcctcattctgtacaatcacacgagcggccagatcgggacgcgtctgtgtcagattatcatagaaaaggcgctgaaaatgaacttctccatcaatataaatccagtccgccgcaccaatctctttcagatactgcaattcttcttctttgaaatcacgcagatgactggtcatcatctccaatgcttcggcataagtgtaaggatactcatctgctcccatcaccccgataatttcctgctcaatttccaggcgcttacgcaacgccttcggtatctccttgtgttccagaaaataacggatcattttctgggcaccggcataatcaccataattttttagctttaaaacatcctccggcaaaggaattttcataaatgataaatcctgatacatgcttcacacctcccatcaactattcgttatcaaaaccaataaatccaaagcccggaacatccggaagcaccagtttcttcgtgtcttccacataaatgcctcccttaaatggcctctctgtcatgtaaaaagtcgcatcgagatccgcgcgtgtgatatttcttgtggctgcaccgagactggctgctgctgtaatacccagattgctctcttctaccatgcatccaagcatcacttcaatgcctgctgcctcgcagatggcattaaatttgtctcttcccccataaaatgtaattatcaatatgcttctattatacaaaaactttagaaaatatcaacaaaaacacatgcgaaaactgatagatacttccaatcagcgcaagctgacccattcttccaggaatggttgcctatactttttttgtgatgggataaaattttttatattgtctgaaaattattattttttttaaatttaaaaattaaagtcagaaaacaccgtaaacgcttgattaaattctgtttatatagtatcctatctatatatacttttatttatttgttttttctataattattcctatcaacatcctgtatcacctgaaattcaatttttcccacaaaatgtcgcgcacaatgaaaggaggttaccaaatgaaatatatccttgcaaaatcagcagccgaagccctggaggccttgctggccgaagaaggaaaggcacggattattgccggtggttctgatgtcatggttgatatggaggccggtaaacttgcaccccagacgctggtcgatatcactactgccgatgatatgaagggcattcgtattcaggatgaccagctcatcatcggcgcagccgtcacgctgacggaaatagccagaagtcctctcatcagacagtactttccatccctgtgcaagggtgccggcagcgttggttctcttcagatacgaaactctgccactttagttggcaacgttgtcaccgcccagccggccgccgatgccgccatggctgttgcgcctcttgatccaagatttgtcgtactgtctaaggatggcattcgggagctggcaatgggcgagatgtatgccggtttcggcaaaagcactctgaattccaccgccgaagtggtaaaggaaatccatattcctctgccggctgacgatgagaaagcatcctttgtccgattggaactgagaaaatctctgtccctccctatgctcaatgtcgccgccatggccaaagtaaccgatggcgtcttccagtgggttcgcatcacgatgggacctgtcggcgtcggcccaacgagagcttttgaggcagaagaatggctcaaaggcaaagccctgacacctgaaaacatggcagaggcaggcagactggctctgcacaatgcgaaacctagaagcaacccgcttcgcggcagcaaaaaataccgcgagcacgccctgccgattcttgtgcgccgtgctttagaaggcatcgccaaacagatggggctgctgcattttgataattaactatacactctgatgatgatagacaggagggagttcatggaaaaacttaatatgacaatcaatggaaaagcgatatccgtagatgtagatcccggcattcgtctggttgattttctgagagataacctctttctcaccggtacaaaaatcggttgcggaaaaggcgagtgcggtgcatgcacggtcattatgaacggaaaagcagtcaccagctgcattatccctgtgatgcgcgcccaaggcgcagtgattgagacgattgaaggtcttggcaagaatggaaaacttcacccgatccaggaggaattcatcaacaagggcgccatccagtgtggcttctgtaccccgggcatgattatgtcctctaaggctctgctggatgaaaataacgcccctacctctgatgaagtccgtgaagcactgggcggcaacatctgtcgctgtaccggctatgtgaaaattgaagaagctgtcatggccgctgcagacagaatgaggaagggagagtgacttctatgaaatatgttggcaaaaacatcccccgcaacgatggctttgataaagccaccggtcttggacagttcacgatggacgtctccatgccgcatatgctctacgccagagttctgcgcagtccttatgcgcatgcaaaggttgtgaagattgacacctctgccgctgaagctttgccaggcgtagtaactgtctgcacttttgagaacacaaccaataaaccattcaacacatctgccactatggtgacaacaccgcgtccggcagaaccggttcgcgatcagacaatttttaccgatgaaccgaagtatattggtgacgaagttgctgctgtcgcagccgaaaccgaggcaatcgcagctgaagccatcaagcgaattaaagtagaatacgaagtgcttcctgctgtttacgaccctgttgaagcactcaaacctgattccccagaggttcagcccctttatggcaataaggaacatcacaacgtctgtggggagattgtaagagttaccttctgcgaacatgagccgtacagtgacgaagcattggaacgcggctttgcccaggctgatgtgattgttgacgcaaatatcaagctgccgcgtgtcaaacagtgccagatggaagtgcatgccgcagttgcttcttataaagccaatggcaccttagaaatcatctccacgactcagacgccaacgccaaccaagatgattgttgcctatgccttcgatctgccggaaagcaaggtgcgtgttcgaaatccgccttatcttggcggcggtttcggtgtgcgcatcggcatcagcggcaaagcggagcttttagcagcggctctgtcaatgaaagcgcttcgccctgtcaagatagtctactcgcgtgaggaagattttattgcctccgacacgcgccacggtggctatatgcatgcacgactgggtgcaaagaaggatggcacttttgtggcgctggatacaacagccaaactcaacaccggtgcctactgcaccttcggtgtggaactgctggctgtctgcggtgtctgcggaacagctggtacctatcatattccttacctgcgctatatgggttatccagtctacaccaatcagcagaccgccggcgcttttcgcggtttcggcacaccgcagggtacggccgtcgtcgaagcctgcgtagacaagctggccaaggtgcttgacatggatccaatcagactgcgcaagatgaacacgatgaaacctgatgacaaaaactttttcccattctctgtcggctctgtcggaacaaacgaatgtctggacaaggccgccgcagagattggttggtacgaaaaacgcggtaaagtccagaccggaaacaagcgccgtggcgtgggcattgcctgcaatacacatgtcagcaacgctgcaccgttctgtgttgattacaacgccgtgaatatgatcattgagcaggatggttctctgcgcatcaacactgccatccctgaaattggtcctggttccacgaccgctctcattcaagttgcctgtgatctgcttggtgttccttttgagacaacgaccatgatcttcggtgattctgctgccgcaccttttgacatcggcagccacgcaacccgaaccctttactctgtgagccaggtcatggaagatgctgctgcagaactgaaagctgatatcctctcctatgccgccggcaaagactttttggatacagatgcctcagctctgacgctggaaaatggcatcatcagtggcaacggcaaagaaatgacgctgaaggcccttgcctacgaggcgcacctcaaaggcaaacaattcctcgtcagcaagtgcaaagtacctgacaactccctgcctttcgccgctcaggccgcagaagtcgaagtggatatggaacttggtcttgtcaaagttctcaaaattgctgccgcccatgatgtcggcaaagttattaatccacgcctgtgcgaaggtcaggtagaggggggcgtccttcagggtgtcggctgggctgtccgtgaggaaatgacctacgaagaaggcaaaggcttctataataccggcttccacaagtatatgctcccaaccgctgatgaccatccggagattatttctattctcgtagaaagcaacgacccgaaaggcacatttggtatgaaaggtattggcgaagtcggctgcatcccgacacttccggccatcttctctgctgtggaagacgctaccggcgtccgtttcgaggaagcaccactgacaccagatcgtgttctggcaggtttaaaagccgccggaaaaatctgattcattcacacgcgcactatccaaatttttgttgcaataaactaacatattccccaaatagcccccaatagaaatatcctggcaggtacaaagcataaagctttgtacctgccaggatcaaattatctacctgttttgagttagggcaacagaaaatcaacttcagcaggttatcttattttagaacatgttgttaacttgaagtacgaataataggagaatttcacttatgaaaccatttttaggtattgatataactaccaaccgcaaaaacgaacgcttaaacggcaatgaatttttaatactgaaaccatctgaaatattatcccagactttggccaaaaccaccgagcaaaaagatgttattatccaaaagtccaaaatgcctttacttctgcgcattattaaatccatatgtctctttctcgcttttatctgcgtcagcgccctattgagagcacgggtttcccttgccgaagcatatcacaacgcaccctgggttttttggcttcttcctatttgcgttattctattcgtcctattaacaatttgtgaaaaagtaaaatcccatcaggtcttagatacggatgaaaatcaacacgcgctggctacccatgatcgtgtcatgaaagacatattggcggagcttgctgtacccgataatgctaaaaatgtggatgtgctgtcttgctactacactgaacgtaacggcaaaataaaagcgatagaaaaagggcttcaggttcatcagttttccaatctaatatttaaagcttaccgtgataatgaaaacctgtatttaaccaactgtaacggaaaatatgctttcccgctgtcttctctttcatctattcgtaccgtgaaaaagcatacagttattaaggaatggcataaagaggagccttatgataagggaatatataaaccgtatcatatgtcaattgacaagtttggctgtctcaattgtaattcctattatattcttgaggttgtacataatacagaaacctatggaatctatattccttgttatgaattaccggttttcgaagagcttaccggattacgtgcagaataaatgagataaaacacacgataacgagtgaaacacgctctgcgagtttcactcgttatcgcgatattcggcaaggccgcatacttcaaatgtcgtcccaccatgctcatttgtataaactttaatcgtcccgtcatgaaccctcacaacttctcgaaccatcgcaagtccaaggcccacacctccaagctcccggcttcttgacttatctatccggaagaacggttcaaaaatctgctccctgaatgcctcatcaattccatttcctgtatccgaaaccgtcagaacaacttcgttcttctccctctttgctgatactgtaacagttccatcggtccgattatatttaatcgcattttccacaagattatataacattctgtaaatcagaatatcacttcctgtcaaaaataattcttcatctgccttttctcctgctccctgtgacttctgtatcagttcaaccttcttttcctgtgccagcggttccagatctgtcagtacttcctcaatcagactatggatctcaattttgtcatttcgcgctaccgtctgtaattcgctcatatccaaaagcgttctgaccaacttgctaagacgttcattctgttccgttaccatctgaattgtctcttctgccgctgttgtactctctggatgttctgttgtatggtatagatccagttgtgcctggattaaggccagtggcgtacgcaattcatgagctgcatttcccgtaaactgacgctgcgtctcaaatgattctgaaagccgcataagcattttattgtaagatatgcgaagtctgtctaactctgcaatcttattctcttcgattatataatctgtcagattctgtgcctgaactttttccactgtctctgaaaattccctgagtggtttcaatgcccgtccactgataaaatacgtcactgcgccgccaaacaacgctacaatagcagtaatcagaaggcttctgcttctatagtctgatttggagttataaaccttcatggaaaactgtgccacaaagtcatcccactcgtcatccggaatatcaatgtacaccgcttccggcgctgtgctctgatccgtgatagactcctgaagcgtatcgaaataatagacgccgtttttatataagaaaaatgtaagacatccgcataatatggtgatcaacactgttgtaagaaatgttaatttccactgaagtgatatttttttcatgctctgctatctccccctatcttatagccctcaccgattttattcacgattggatcatatccgagtcctgctttcagtttttttctcaaagaagacatatgcactcggattgaaccactgaaactgtccacagaagaatcccagacatgctcaatcaattcttcctgactgaccggtcttccttgatttaaaaggagatattctaaaattccattttcttttctcgtcaacgtaaccgggttatcttctgcataggcaaccctttctctcgtatcaaatcgaagttttccacattccaggcagatatttttttgtacaaattttcttcttgtcaggcttctcacgcgagcttccagctcctgcaaatgaaatggtttttccatataatcatttgcaccggaatccaatccctcaaccttatctgcaatctgacttctcgcagacaggatcaacacttttgtctcttcattttctttgcgaagctcccgaagaatctccattccatccaacccgggcagattaagatcaagcacaatcagatcatacatttccgcatagatcatatccagtgcctgctctccgtcattacacgtatccacctcataacctgccaggtgcagacttttcgcaatcatatcacataatttcttctcatcttcaacaactaataatctcaatttacttttctccattttcttaacaggaaatttacattctatattatataatgtaaccattgaacggtcaataagacgcttaaagagcaataacattgaaaggaacagttactacttacagtaacaagaggtatttgaatgaaatcagaaaaagcaacacaagtttttttacttgcagccggtatggtattttttcttgttggaattttccgtggagaagctgcagttgtactcagtaaagcaataaaattatgtatggagtgtgtcggaattggataagaaaatgaaatcaaacaaaaactttctggcccgcttccgcggatggattcaggcagttgctacactgctgaccaacattcacatcccgaatctgtttaaagggaaaatttatcagggaaatgtaaaaacaatgtgcgtcccgggactaaactgttactcttgtcctgccgccacaggtgcctgtccgattggagcttttcaagccgtggtcggttcttcaaaattcaaatttacctactacatcaccggatttttcatcctgttaggtgttctgttaggacggtttatctgtggatttctctgtccgtttggatggttccaggatctgctgcataagattccgggcaagaaactttccaccgcaaaactgaagcctctgcggtatctgaaatatgtgattctggtcgtctttgttatactacttccggcatttgtaaccaattcacttggtatgggagatcctttcttctgcaaatacatttgcccacagggcgtacttgaaggcgcaattccgctggcacttgccaactcaggaatccgtgccgcactcggacatttatttacatttaagttcacaatccttgcgcttttcatcatcctgagcatcttgttttaccgtccattttgtaaatggatctgcccgctgggtgctatttactcactgtttaacaaggtatcttttcttaagattcaggttgatcatgagaaatgtgttggctgccagaaatgtagtcgtgtctgtaagatggatgtcaatgtagtagacacaccaaaccatccggagtgtatccgatgcggagaatgtatgaaagcctgtccgactgatgcaatctgctatcattacggattttcaactaagaaacaggctgaaaataaaaactaataaaacgtaatttaaaggagatttaaaatcatgaaaaacaaaacacttagaacaaactcaatgaaattaaaaaaggtaattgctgcatcccttgccatttctgtactttttgcgtttacaggctgcggaaattcctccacaacagacaatacaaatacaaaacaggaatcttcttccacaacagacaatacaaacacaaaacaggaatcttcttccacaacagaaacgggcagcgcagacgagctgaacgaaaaacgtgatgacctttaccagcaggaaaaccagctttttgctgatcacaaagatgcatgggacaaagcctttggtcttatgaacaagaacgctgccggtgatgccatgagcgaaaactatgctgattccctcgcaagcacagtggaatctaacaaagactctttctctgaagaagaatataaaactctgtgcaaagacatcgagacaatccgcggaattgaagaagaaattgccaagcttgagaaagagattgctgcatccgattcctctgacagctcttcctccaaatcagacgaatccacagctgtattcaaaggtttcaaaggaaaagatctggatggaaacgatgtggatgacagtcttttcgctaaaaataaggttacagttgtaaatttctggttcagtggatgcaagccatgtgtcggagagctctctaagctgaatgaattaaatgagaaactcaaagaaatgggcggcgaagttgttggtatcaatacagatacattagatgataatcaggatggaatcaaagaagcgaaagaaatcctgaaggcccagggagcttcctacaaaaacctgactttcgattccgattcaaccgtcggaaaatatgcaggaaacattatggcattcccgacaacagttctcgtagataaagacggaaatatcattggcgaacctttcatgggcggaatcgatgatcagtcaaactacgatcagctgatgaaacaaattcagtccgtactggaccagaaataattcatttactgaagatgtatactaatagcgagggcttgaaagtcctcgctattactatgatggtcagctcattttcttttcttgttgccgtatgatttccgctaatatcgacagcatgttatcaacctggattggctttgcgatatgaccattcattccagctgcaatagcctctctcttattttctctgcttcatcctcaaatctccattgtttttgtaagtggaacgctcttgaaatcacgattgttatcatatatcagtgcctgacttgctcccatgaggaaacagtctgctttctcattagtgaccatatctgccgcatcagtaagcgaatcgtaatctaccagtttccattgaggataactgaaagcaatatgctgttttaaggcttcttgttcttttggcatagctactgtatacgactcatcctcattgaaatatttctcatcagttactgccatcagactgtaggtccaggctgtgtttgtaagtgtatagcccttcttttctgcaagatcagaatttctgccggcataaaaaatcatatcaatttcatgttcctgcagcgcctgaagcatttcgctgtaatcatcatattcttgtatattaaatttcagtgtctgattccccaggcagtctttggcataagaagtatattctgccaacatacccgtaagtttttcagtttcttcgtccctggaaaaaattgtcggatcattatttaaaaatcctatccgaatgtcaccatgttcttccagccaggatttttctccgcctgtaagactctgattataatcaagcgtaaaatacttcttatataggtctgccttaaaaaaaggactatcctgatccagctgatgcatagcataatccagttccgtcttgatatcgctgcgctctttatttattgcaaaatacatgcctgacttgccaatcgtggtaacatctaaaggaaaaatgcactgccctttccgacaatgcatcctaaacgttgcaactggctgtcattttacagaccctatagctttgcgtctcagcctttcgactaatttgccgacgaatctttttttgtattatattgtacatttttcattgaagctgtctattataaatatttcatcattgttggcacaagaatgttcatatcaacaggctttgcaacatgatcattcattccaacagaaagaaccttttgtgtatcttctgcgaaagcattggccgtcatcgcaataattgggatactggcttttttcttatccttcatctttcggatagttaatgtagcgtcatatccattcataatcggcatctggatatccataaggatcatcttgtaataatcagcatcagctttttcaatcatatcgacgcatgcaacaccatcattggcggtctcaacaatacatccttcttccgtcaatagttccgttgcgatttctgtattgatctcattatcttcgactaataagattcgaacaccgttcaagcattttttctcgcacagattactatttttcttcaccagagaatcggcttctgacgcttttctgcaaggaatagttactgtaaatgtggaacctttaccctgcttacttttcacttctattgtgccatccatgagctctacaagctttttcgtaatgcccattccgatgccactgccctcaatatgactggatgtagtgttacgttctctttcaaaagtttcaaaaatacgtttttggaattcttcagacataccaatcccattatcggtaatggtaatgatcatattgcaccagtcttctttttcacaggatttctgtacaacattacaggatatcctgcctcctgtatttgtatactttattgcattgcttataatattaaggcagatttctgacatgtgcggtacatccatatatacatacggatacataatttgttctgtcagagagagtgtttgatttttactttctgcctgttgttggaacataatgacacaattttcaaagcactcatggacatttgaaacagtgtattccatttcgactttattattttcaattcttgcaagatccaaaacattgccaagcatcgacagaagttcttttccgcatatttgaatttcttcaagatatctgccaagtttatctgtttcctgcaaatgtctggacgccagttctgcataaccaatgattgcattcataggagttctgatatcatgagacatattatacagaaatgatgattttgctttatttgcacattctgcttttgatttagcttcccgtaattcttcctcttgtcttaattcccgcattttttcatctgtcacatctcgattcgcaaacagcacagatgtaacatttccatttttatcataactctgaggaacaaccatagaatgaaaccatgatccattcttctctttgaattcggaagacattgattctttattatgaagccgtgccgccatggtttgtatatcaaaaaaatctatatacttctgcacaaacggctctgctatagtatcctcgataatcttgaactgaggatcccaatctgcagtattgtctttaatacccttatccatttctcgagatattttgacaagttctattttctttgtttttaagttcagccttgagatatgataataggcagtacctaatgcctgaagtgcctgctgggttttcttcatctgcttccccagtgtgagagggaactcttcaccgtccatctgctccaaatctggtgttgactgatgcagatgctgaaccagccatttcccattcgtccacttatagataatcgtaaatcttgtctccattttaaaacaaatagaaccatctttaaacagaccaacaaaatccactgtcccgtgtgcaagaacatggtcatcatcaagccgttcttctttctgatgtaaattttgtacttcaagtctgattttacctctccgttttacatcaaatttaaatgattctaaaaactcatgcagattcgtgaataactcatgtttcccagttccaatcagactaatattttcatcaaaataattctctataccaaaattatctactgattcggcattaatatatactttcaaaagttgctctgtgagttttttgaaatcatccatacgcttccctcgtgcttaaaaagtcttaagtgactttaagttttctgttttatttctaaagtttatccacttttcattctcttccaaatattccgaatataaatgtcaaattgttttctttattatatcacagcgacatattattctgccatcttttttcaaaaaaatagcaaggtctccaatttcaatcagaaacctggctatgtaaaaagggcgactcaccgccgccctcatcgttaatattctgtgctcaatagaaaatctgcaatgtgcatactcttaatgccttggtaatttcctccggcaaattcatcggttctcaaaacatacttcggatagttatctcggatttccagcagccgttcatattcgcgcttttctgttttttcggatttaatctcctgcgtgacctgcacatacaaccggtcattaataccgcaagcgcataaaaaatcaataggttttgcgattataaaccgcaacttctattggtttccatcgactttttcggattatgtcgaattctgtttccttgcagtttcagaataccgtagtttaaccaaaaagtccagaaagcagcggcaccagagttgtgccgatcagtgccacgccgccaaccatcagctgtttcatccacaattagcccaacttatgacgctcaagcatggaacgacaatcttttgctttcattttacaaaagtccgtcttgaaatttttaacacttccacttttggtcagttccatcgcagttcgcacgtctgtacaccgaaccaactcatcctccaaattcaaaacttgtggaaaaaatgattttcaactttccgcaataccgggtgagaagttccaagttctttttaaggtttgatgtctgtggcacatcagtatcaaataccaaaacgacagtcgttcccgcctgaatagatttccaactcgtccaaaagtgaatcctgcgtaaacgaggcaaacacatcattctcgaccgcacagcgtaaagagtctgtatttcgtttcagtacatccgatgcagaaacagccgaaacctgatatacaccttcctccagatgcttacgcaaaaacacataatatgccgctttatctcaaatactccgtaaagaatgcgttgagcttttcaaacggaatgatgtccatctgatcgtaaaggtcagtgtggtttgcaccggggataatgagcaattccttgttatcgccggtcagcttgctgtacgctgtttcgctgaaatagcgtgagtgcgctttctctccgtgtaccagcagcacagcagagtgaatctcgctgctgtattgcaaaatcggcatattcagaaacgacagcgaggatgtcacattccagccgttattagagttcaagctgcgggggtgatggcctcggggcgtcttatagtaggcgtaatagtccttcacaaactgcggtacgtcctccggcagcggatcgaccacaccgcctgccagagcataggtaccgtttttgtaatctacagtgcgctgtgcattcatggcttttttcttctcatagcgtgcctgctcagaattctcagcatcaaaatatccgttggcagttacacgggtcatgtcgtacatggtcattgccgcggtagctttgatgcgggtatcaatggcagcagcgttgatcgccataccgccccagccgcagataccgatgataccgatacgctcgaagtccacattctcctgcacggaaaggaagtctaccgctgcgcagaaatcctcggtgttgatgtccggcgaagcgacataacggggtgtaccgccgctctcgccggtgtaggacggatcgaaggcaatcgtcaagaagccaagctccgccattttctgcgcgtacaggccggaggactgctcctttaccgcaccgaacggaccgctgacggcaatggcaggcagcttgccctctgtgcccttcggcgtgtacatatccgccgccagtgtgatgccatagcggttgtgaaaggttactttcttgtgatccaccttgtcgcttttcgggaacaccttgtcccattcctgtgtcagattcaatttttccatattcagacctccttgcctgctgccttaaaatatactgtgttgtctacggcttccaaccattcattagaggtttcgtcccccggaacctctaccgccagatgagagaaccagctatccggcgcagcaccgtgccagtgcttgacgcccacagggatatttaccacatcgccggggcgcagctcctgtgccggtttgccccattcctgataataacctcgaccagctacacagacgaggatctgtccgccgccgtttttcgcatgatgaatgtgccagttgttgcggcaataaactggactccccctccgcaatcccttgtagttgctggctttaacggcatacacatttgtgctttgtgcgaatcttttctgacgagcaatttctaccaggttatttttctatttcttcctcgttccaaacctcttttgcaaggttgaatactgcccatccctttggccatcctgcatagaatgctatgtgggtgataatcgctgcgatttctttctgtgttactccatgatcctttgcattctgtaaatggaattttaaagaagaatctgtaattccctgtgccatcagtgctacgactgtgataatgcttcttgtctttaaatcaatatcttcgttgttccaattctctccgaacagaacatcatcgttgaaatgtgcaaactccggtgcaaatgttcccagagcatttcttcctgctgtctgtgtgatctttgccatgatatcaaccctccgtctttcttatttatggtaatttgtcatactcttcttccggtaaaaactcaagccattcattggaagctccttctgccggaacttcaacagccagatgctggaaccagctgtctttcgctgctccatgccagtgttttacttccggtggaatatttaccacatctccagctttcagttcacgggccggttttccttcttcctgataccatcctcttccaccagtaaccataaggatctgaccacccttgtgatggatgtggtatgcattgattgttcttggagcgaaagtaaccagaccaacaggtactctctctgttgtaagcatattcagatagcactcacctgtaaaatactttgcaaatgctacattgtcctcaccgattggaaatacgttaccaccgcctaagtcttttttcatctgttcgatatccatgaaaatctcctccttgcgtttttattttatggtacaacctgaatcaagctttaggtcaatagattttgcaactttttacataaagttcacatttttcctgtgacagtttgcatttcagattcactttatttcttatcgttttttatcatacacccatattgcttcctatgtccaatacctattattgtaggttgcttaatgccttttaagcataatcaaattttatatcacaatgcaaaacagacctgccgcatcctggcagatccgctttgcattgtggtatagcttaaagctgtttgataagatttaattcccttttggacagtgcctttttcaacttttgattctcttttttcagattctcattctcgctcttcagcttctgtatctgttgctgtagcagatacatttctgtttccattgcctggctgatgatgtttctcctcggatctaccatgccagcctgctgttccattgctgcatcaatctcacttcgtacaatcggattcttataaaagaatcctctggacagccctgtcttttgcatcagtgctggcacggatactttttctttttccaataccattgtccggattgccaggattgcacgttccactttctcttcgctttttcttttattcaattccaacatcttgtcgtatttgttcatattcttctccccatccgtccagattcgccaggataatctgtgacataagatttcttacttcccgtgtttcatctgcaagcctctgattactcattttccggtaatactggacacttctcactcctttatgtccgagaagctttgctatggtccagtcatccacatggagttctgtcagctttaccccatagcagtgccggaacatatgtgttccaaatccgaataagttcccattgtcatcccggatatctttttcatagatcatccgaagcactttatcctgcaaggttcggtagctgattggtttctccggtttgttctcggctgcaaaaatataaatgctttcaggataatgctcatttgcataactgactgcctttccaatcagctgtgccagttcctggctaatcggcttttcatatcttctggttttgggctgatatatgacaatcatatcctgactcccattcttataaaggcagtctttccgtaaggtcagcgtatcggaaattctggttcctaacatctggtgtataatcatcgcccttgctatctgcacttccattttcaccagatgggcattcagccttttcagctcactgtctgaataagatttgaattccgcttttcgttctggtggaaaatcagatttcaggaaaagttttgtcaggtgtggaaaattataaatctttccaattgtttccaacacatttcggatctttagcaggtcatcccggataccctttcctccgcttgcttctactttgatgtttatcaaaaactgctctatgatctcccggtcaagctcttcactggtactgatctttggatgtttctcttctaggtactttgaaaatttattcatagcagacaattcccgttttatactgccaacggcttccgtttccagatgatggtaaattgcttttttcacctcttcccgaatatccggctgtcggattcctctgaaattcagtgtcttgtggttgacgattggattggtccgcaggataagcggaagcctttccaaatgccagatatcctttgccagctcattggtttcagatcggtctaaagtaaattccagaagattttcaaaataccggatcagggcagctttctccacagattctgtctgaatgctcgtcactttatatttcgtcaatgccctgccaatttgcatcatccacaattttaactgtttaatccagatgtcttttcccctgtccagcaggctgttttcctgatgggacggcttcttaaaaaattcgcataagctgttaaaatgttgtctttctgcctttatggtcaaaatggatacctgtgttccccggtaatatatgtactcggcaaattctgtctgaagctgttttcccggtagttttccaaggtcaaaatacggttcccggttcagcttttccttttgcatatcattggccagcttatagcattccagttgctggtattccagtctctcattcattttgctctcctttctgcatacaggcaagcaggctatttccctcttcctcaaaatatgtgtcattttgttttgcaatctttcttggcatatagtctatatactgcatggtcatttcctcaaatatgtgtcccagatagtctcggatgctttggatcgacacgccatgctcataaaaattggttgctacggtatgtctgtaatcatgggatttaaaaatatactcccccttctgtatacctatttggatgcaatactttttcatctgatccatgaaggtacttttggaaaatgctccacctttccgattctgaaaaatgtatgcttcttttcccctctggtgttttttcaaatacacctgcatcaatcgatataatgttatcgggatcggaactcttttataatttttcatttttacctggtagacctttatccagcagtcaccattctggatatcataagcatcccctttcaaggtacagacttcgctaacccgcaagcccacacaccagagatgtaaaaacatcattctcagatgttctggaaactgtgaaagattctgtatgatttccatatacacgtcctcttccacgcttctgttgtgatgcactggaatctctttttcccagtaataggatacataaaacggaactttttttatatatccttttacttccagaaatttcataaaaaactgaattgcggtaacatttgtattaaatgtctttgctcccattgatccgttctgcagattttttaaataagtgtctatcagaccggcatcgcactctgtcacatctatctgatgttcatcgatttcctgcaaaaagtttctgattgttcggaatctttcataaacggtgctgagtgccagttccccgattcctatttcatacttcatgtattcctgaagcagccatcggttcttgggatacaaaacttcctgaaacgatattctttctatactgtcactttgattccgtcgttcttttgcaatatgaaaccgatctaagtaccagacagccgcatcccatcggatttcatctgcctgtacaaaaatcactttacgggcagtctccacaattgtcctcagccgttttcgccgttgttccttttcgactttctgctccaggtagctctgaaataatgtttcctgtttcagctccatcagatggatatctgtgatctgctcccggatacaaaattcataaaaaaactgtagcccggtcagtttatattccctcagccgtgaaacctcataatgttccagaatatattccagtaccgtaaaaatctggcgtttcattttttcactggcttccgctttaaagttccagaccatattgctccgacaccgtaccgtctctacgctctttactattgtctgctccgaatggtatgggacaaacaggatttcatttttatatttccattcacattccctctgtcctgccggagttttcattcgcacccggatgtacgactgtcgtatccggtcgaatgttccggtgtatcggtaaaggtatttttgctttatcaacggtgttatgtatgattcaaatttctttcgcagttcataatctatttccgagagacgttctaccatctcatctgccagaaacaacagaatctgttctgtaatagaacttcctgcttcctcttctgcatactcacggacttcctttcgtagctgctcaatccgcctgctccgttcctcttctgcttctataaaaaattgtaaaaacgcaggcataaaaccacctcctatagcaattcctcaatcccatacagggaggaatgtttctcatagaattcctggctggcatcaagcagttcatcatccacaatgtccagatagttgatggttgtctggatgtggcggtgtccataagccagctgtatcagttccagcgaccatcctgcttttctccgctcatttccaaagtaatgccggagcatatgaggcgtgatcttaatcccggttttcttttccattcttttcagcatggagtatactgcttccacgttcattggttttccgatgttatccccggaaatattcacaaacaggcttgtttggtgctgaaggagttttcggtactctgcaatatacagatttaaaaaatcgaaggtatctttgctgatcttcgcacttcggtattctgcattcttggctctcgctccattttcattgtcctcacggaaatatacccggattatgtggttccgataatcaatgtccttactataatcaattcccaaaatctcaccgatccggtagcctgtctctgccagaagcagcatgagaagccgatctcttatattggtacacgctttcaggatttctacaatttcatctttctttgctgcccttgccttatgctcttcctcttttaaatagcctttgaagctccttgaccgtatgcttttctttacacctaccgcatcgactgccataaaataattataggacagtgctttcagttccccgaactgctggtactcttcttctataaaaagatagaacctgaacacatcttttaagtatgcgttgcaggttccattgttcggagatctgtgattttcatcttgcgtatgttttccagctttcagccagtataaaaactttacaaagtgttctgtctgttcgacataaggcatttgatatatatctatcaattcctgttctttttcatggatatattccagataatacaggatggaaagtgcggagcgccgtatcgtattcggcgaacatttgctccgtatcttgtgcatcagatatttggtaggaagcaggacaatgtccaaagtttctatatctctgatgaagaaataaactgcagagccttctctttctgtttccagctcatatcttctcatttctgctcacttcctttcctctaacgctatacacagtatacccaactcatgccgataaagctatcaccaatactaccaattcgctccaaaccgcccctgaaataccactaaactttttgtcctgtctgctacccggatctgggcagaaccaataacgccacggatgttctcagctatagtaccgctccactttccggcttcggataaaattttctacttcttcgatccgttctgccatctggcactttggcagtgcttccagaacatcactccgatacctgcctttctttgctgtccggtgatccaaaatggacacaacgcaggtgtcctgctccgtgcggattgcccggccgaatccctgccgcagcttcttctgcatatccgggactacgatggtctggatgtaggattccagggatcggtactgctccttttgtgcttcatggatggggtccggaacagaaaatggcagttttacgatgatgagagacgataccatgtcccccggaaagtccacaccttcccagcaggagccggctgcgaacagcactgcattctccatcttcttaaaccgtgcaatctcttcctgggagtttctccatacctgcaccatcgggaacgggatctgatcccgcaaaagctgatgcacatttcccatcagggtataagatgtgaacagtaccagcgtatgcccgtaagtggaacacaccagatcacggatctgcccggcaagctgctcggcctcttccctgcttccctttttcataggtcttaaatgctccgggatgtaaagcagacagttctctttgtaacagaatggggattctgccacacactcccggacgcccgtttctttttccagcccggtcatctgtctggttcttgcaaacccgttcccggcttttaaggtgccgctggttaagatcgccggaaatccccggctccataaagtcgcatccagatacttcgggatctcccggttgactgccataaaggttaaatgtccccggctgtcctgctgtaaaaacaaaatatatcgcttgtcgttctttaaaaaccatccgaacagctcttccatctcttccatccgccgaaagatccagtaaggaatattcccggcaagccttttgatcataagctgaagcctttcctgcatctgggctaaggctgtgccagctcccggcggaaaataaaaactttcttttccagccatgtcctctgtgccatctttccgatgctttcggatctccgcctgaagtgcagaaaacccttccatcagccgttttccatccgtgcctttatgctctctgcctaaaaagtaagcaatctcctgcacatcttcccttccaatgcttcttccatacatctggctggcggcttccgggagtttatgggcctcatccacaaccagagccctgtaatctgccagaagcggccggtacccatttgcccggtgcatggcatctgccagaagataattgtgattgcaaatctgtaaaaaaatgtcctctttcctggaactatccagatgcttctgataacggcattctacttttcccggacactccctagggcagaattttggtacgcacaccagcctgcggtcaaaaccgctcaggttatgtacggaatctaaatcaaagttatgccggagggacttcaatgcctccatctgtgcctgatttttattcttgtcccggactgcctctaatctctgggccagcctgtaatcgcatacaaaatgttcctttcccttgcggacgactgcttttaattctccctgaagcagatctgcttttaacagtacatccgataagaaaggaacatattcctctatgatggctttctgtaaggcgatactggaagtggataccactacagaccgcctgtcacatcccgaataaccggaatgcagtacactatatttccgcatcaggatgcaggctgtcagataggcataggtctttccgatgccgactcctgcatcacagagcgtgatttcatttttcataagggcatccagcatttcatggcagagacggatctgttcttcccttacatgaagcccggcttccgggagcagctcccgaaagatctgttccacttcgccatgtgcccttttctgatattcatttttataacacattacttctccttgccagaaagcttatcttaccgtacccttacggacgggtctggtcgcttccggtgtattctgtccctgttcctgcattttctttatggcagcattccctcttgccatcatccttcggatatccgtccgggaaacattccatgtccttactttctgaggagctttccttacctgctcagacaaatggcattcacagagtttcggatataccaccattgcttccggtaattccagcggatactcgatcatgggatggtacacaatatcccggatcacctgctcataacattccatctgcattcttgccgtactgtcctgatagatatttttccctttcatggcactgtagacctgcgatgagatgtatcccaacgcttcaaaactacagtacccatacggagtcacgccggaaagggaatccggatcttttaaggcattcagataaacttcttttccctgggcgatcagccacatccgaaaatcagaaaaactgtcatcactacaccctgcttccatcataatacctgccgctgtccataagccgtacttataagccgcatcccggtaactgtaaacaagattgtggaattggaggacatcctccggtgtcatatagaagagctgctgcttgatccacactgccgaagcatccagatcggtgccgcacacttcctttgctttttcaatcagattccagaattgatccttgctcattccacttctttttgtttcttccatctgttctctccccttgatgtgacgttaataccacaagaatacggctgtagtctcccacagccgcatggtatctgatatcaacgacacacttcttcattgatttcttttttatcttgctgttccgcatttgacctcgcacccccggaaccatccctgtttttcttctgggaaaggggacactacaggcgggcggctggcctgccgccgctcacagatgtcctgggggtctttctgattacaacccggagtccatcttccgctctctggctggtaacgtgtatcattatcccccatccgtgatcctggcgaaaggctgccaccgccttattcacagctatgctttctcgctccaagtctaagaatctttaccctatacttaatcatggcgctcatactgtcacgcttctacggttgggaacgtacctgtagtgccgatattcacttgccaaagaacagccgagggatgtccctctgcttactagccgatggcagtgtatttttttattcacttcacagaaaaattttttatcgtgcttccccggatctgtttttcttttttccttttgccggattcttctgctgtgcatccttcttccgactttccttctgctctttttgttcctgcggtggcatcttcatcacatgaagttccccgttaaacagggtgaaaacttccggtgactgatatttttctttaaacttttcaatctgctccggtgtcagcgaagtaaaatcatcttctgtcagtcctaccacaaggaatgttccggcaatggcatcatagacctgtcctcggtcatcgtacaatgcccgatttaacggcaacccctcaaattttccattgccgtttaaaagaattccaacctcatcctcaaacggataagtcatctcaatgtcaccgcctactgcctgctgcagatcttccagctcattggggatgcttttgacatagggtgctttcatcggctcgactaccagtaccgtcatcatttcttcctgcatttcggacacttctttctcatccatcgtatcaatcctcctgtctattcgttctgataatcagccgatgagagccttttgttttattcaaatttcatggactttttgattttctcccgtaacctccgcagtcttgtataaacagtctgctccggcagttccatgtgatggctgatctcctttggtgcatatcccatcatcttcagaacaaccatctgaagagttttcttgtcagtcgataacaggatctggagcaattcctcattctccacggtatcaagcagggcttccacactctctggctgagactctcctgattctttttcttccagaagcagttccatacagtccagaagtgaggtctgatgttcccggaatctccgctctgcgttaaaatcgttccagtcatactcccggagcttctggatcgtctcttcatccacaccctgctcacgcaggatcttctcttcctctgctttccactggttccatctatattcttcttttgctttgttataagccacttatcttttcctccgatctgaatttttgtgaaatcaaatcggagtgtggcggtgatctggctcgttcttcctgtccacaggaatgtccggcatctctgctgtttccctgcaaacacggatctcctttgtaatcatatctttacaaaggcacagtgtatcggatgcacctgtcagttaacggtcagaaacctgtcaattgacggtcaatttttatcaccttctttccagcacaaataaaataagacgaacaatctttttacggattattcgccttactgctgttcgttttcattattcaattcaaatttgtaacctatatccctgacactgacaatgcaattcccggcaccgtcttcaacgacattcaacttttttctcaatcgctttaccagacaccagatgatatttttaatatcaccaacagaataatctttccatacaagctggtaaatctgttcaaatgtgtatactctcatcggtgtcaccgctaataagtataaaaaattatattcttgtcgtgttaaatgtaacgctacattattccaaaatactttatgtttcttatgatccattacaagttttcccttattaatcatcgtttcggactgcttttgagttattttttgtttattatttcgtcgtgccaatgaaaaaatctgcagatctacttcttctatagtgctatttatatccattacacaatctgcaccagcgtatattaattcttttttccatgacatacacaataaagaggaagcatccgtcaaaataataattggtatctgcgttatttttctaatagcagatataatattacttatgttctctttataaaggatcactcctattataagcacatcataagaaaataaactcaaattatgcagtaaaatttgtagattttctgcataatctgagtttacctcattgaatagttttcgatatgattgattgtcaaaatatgctaatattttgtattttgtgtctttcatatttctatttaaaaaaagcaacactttctatttcttcacaggaaaatcatcaaatgtattgtcaattttttgtgaagcaatctctctcatcgcatgctctttcagtttttgaaaactttcatcactgactgcatgttccatacgacaagcatcaacttctgcaatttgtggattaactccaacggatataagttgatgagtaaaaaaacaatggcgttcgtaaattttttcagccatatcccggccaagttctgtcaggtgcagataatgcttttcatccattgtcaaaaaaccgccctctcgcaaagttcctactgcataacatacgctgggttttgaaacctccatgtaccgggcaacatccaccgaacgcaccataccgagcttcttttgaagtaccaatacagcttccagatagtcctccccagatgcatgaatcttcatctttagtcatcctcaaaggcaaagaacttttgcaaccgttcccggcttattctgttccatccatcactccatagcacttttccgttttctataaagacaaagtaattgcagcactccgcaatcagctccggatcatgagtaacaataaacaaggttttccccaacgaactcaattcccgcaaattctctgccacttttttcatgtgccgataatccaatccgcttgtaggctcgtcaaaaacaataacctgtttatcagacgcaatcgcgctggcaatcgctaccctctgtttctgtccgccggacaacgacataggatgggcgtctctaaattctgaaatgtgcagactttccataatactttctgcctcatgcgccgctttttcttcatctgaattatccagactaagcaagatttcatccattacactttccgtaaaaagttggtggtttacgtcctgcataaccatatagcaggtcttaattctttgatttgccatataagtttttccatccatgctcataccgccttttgcggttttgagcaatccgcataaattgttagcaaaagtcgttttcccggctccattgttgccgactactccaaccaccgaaccttgcggaatcatcaaatctgatatatccagcaccttccgctttttcttcttacctccggaagcatttttataagaaacttcaaagtccctgatatatagctgctttgtcgcacacactgtgctctgcattttactaaaatcttcagactgtaaagttctaagacccagcgcgtgcaattcgcctgtagatttctttttgaagtcggagatggaaaggttttcttttatttgcccgccctgcatatatagaacgcgatctgcaatatccatcaggtaatacaggcgatgttccgcaatcacaatcgttttcccctgtgctttccatttccgcaatacatcttttaattctctgattgatttaatatccaaattggaagatggctcgtccagtacaaatatatccggttccattgcggaaacggacgcacaggcaattttctgtttttcgccaccggacagtgcaaataagctcctattcagtaaatcttcgatttttaacgcgcctaccgttttttctatccgcaaattgatttcgtctgcgtcgattgccaaattctcacatccaaatgcaatttcactggtagtatccactgtaaaaaattgtgtccttggattttgaaaaacagaaccaaccacaccagacaaagcataaagggatacattttttacatctatcccttctacaatcgtctgcccggtaagcgttccttcgtaataatgcgggataagcccatttattaaacgtgtgagtgtagtctttccgcagccggattctccgcagatcaaaacaacctctccgtcatggatagtcaaatttatattttcgatttttccttttgaactgccttgctcatattgaaaggctacatccttaaactctatcatttcagccctcctaaaaaagcaggaacaccaacagggcagcagtaacaataatcataagcgcaaaatctttccaatggaaaccgatcttacaaatgcttgtacgcttttttccgtttcctaatcctcttgtcaaagctgccgcagacaggtcattccctattgttactacagacatcataagagggacaattcgatattctaatactgcttgtggattcttgaaaaaatttttccccgtgattcctctcatacgcatagcgtttccaatagatcccgcttcttcggaaattgtagggaagaaccggaacataacagaaaacgggataatgaatgcttctggtatatgcatacgctgcatagcaaggacaaattcactaacctttgtagtcgagagaagataatagcccatcatggcgcttggaaaccatcgtgttccaaattgagccagcagcgatattataattgttcctattagtcccatatacggaacaagaaatatgttcaccgcccatgaaacaacaaaaacaatcagatagatgatggcaacctttttcctactgcccgaaagcaggaggaaaaagggtaccaatgccagaatcggctttaaccagaaactaataccgtccgtttttccgtcaatcattacaatactgaatattacaagcatatatagctttgttcttggatcaagccagaaacgtcgctccgaatcaactgacagtaataattctggtttcattaaacaatgcccgcctttacaaaatgcttcttcaaaattgcctttcctaaatatgcgccgatcactccgccaacaatgcctaaaacaatgactaccggaagcatccagttagcagtaaggcccataatggcattgatgtattcgtctgtaccgcctctgcttctgtacgcctcaaagaaagtatctctcataatccacataggcagcatggaaccgattacccattcagtaaacacgcaatatcccagtacagtatgtttccagcttttatattcgccagccttgaaaattaaatcagcaaggaaaccgaatacgattccaaacggaatagaaatccagctttgtcccatcagaaagcagaggacgctgaccagcgtacccataatagttgccgcaccaaatttcccggtctttgtcagaaacagcatgaacgggataccgcccagtattcctagaaccagtggtataatcactgcaaagataggaatataacccatcatacccgtaatgaaaaacataacaaagtagatgacagtaaagataccgatgttgataaagtcttttgcattcaattttttcttgtccattgtatgaactcctttcttttatgcaaggctgtctgccttgattttccaaccgatagctttttctctcatgccaacaaaatccgcgtaaatacctgcttgtttgataagctcatcatgcgtaccttgctgagagattttaccccggtcgataacgatgatttgatccgcattttttacggttttcaagcgatgggcgatcataataattgtttttccctgagtcagtgcttcaatcgccttctgaagctctgcttcattttcaggatcgacatttgctgtggcctcgtcaagaataatgatgggcgcatctttcataatcgctcttgcaatagaaatcctctgcttttcgccgccggaaatagtcgcaccgctttctccgattaccgtctggtagcccttcggcaatgctgaaatgaagtcatggcaccttgccgcctttgctgccttcactatctcttcatgggtggcgttaggggaaccgaatttgatattgttctcaatcgtatctgggaacagatacacattctggaataccatgctgatatttttcattaagctgtccagcttgtaatctttgacatcaatgccgccgatacgaacacttccactgtcaacatcccaaaagcgtgcgattagatttaccagtgttgtttttccagaacccgacggaccgacaatcgccgttgtggttccttgtgggattgtaagcgatacatggtcgatcacttttttatccccataggaaaaacttatattctgcatttcaatatccagccggtctgggatctgctctttgccgtcaatgtcaatctgaggactctggttgatttcctccacacgatcaatagaagcgtcgatcatggaaagcataaagaacatttctcccgcgctttccaactggctatataccatgaacgccgataccaaaatgatcagacaatatgttaattccaacgcaccatttataaaaagcgcgatagaacagaaagcagcggtggcactggcaatccgaaggacaacctgctcggcagctatatagggaatccgctgtctttcaataagctggtttttcctctgtgtttcgtcaatagacttttccagtgtagtatttgattgctttgccatgtggaacgctcgcacaacgctcattccctgtatgtattctagtacagcgtccataaattctgtttgtgcatctaaccgtatgggagataatcttttggagcagcgcaggagcattgtgttaattaccataaacaaaattacgccagttaaaaaaatcaaactgatcttccagctaaaatagctcatggcaacagaaaagatacttgcgtggattacaccaaccaaagtccgtacgataacagcaaaggacatgctttcaaggtcgctcatagtcgctgttgaaacggatgtgaggttgcccagactatggctattaaaataacccatcggcatatatttcatacggttgccaatttgaatcctcttatcctcacacattcggtagctgccttcgccttcttttccatgcgccagataccagaaaatagcggtgccgatcacactgaccagcataataccgaaggctagaagcgcagtctgtgcggtgatattatcatggactaatccgtccagcactaccagaagggcagcaaattgcagagcctctaaaatgcaccgtatgatttcataaaagagtcctaaataccagtttcggctctggcggcccgcaaattcaaaaaattttctaaaagaatgtatcatactgttttcacctcctttgcacccatatgggctgtccacatcgtatgataaagactgcactcttttaataattcctcatgcgttcccttcgcttggattgttccatcctttacaacaacaatctggtcggcatccgttattgtggacaggcggtgagcaattacaatcaatgtttttccctttgtcaatcggctgatggcctcctgtattaccgcttcattttctgggtcagtataggaagttgcttcatcaagaatcacaatcggggcgttttttagcatagctctggcaatcgcaattctctggcgttctccaccggacaagtgccctccggcaccgccaaccacggtttcatatccatgttcaagattcataataaactcgtggcagccggaagcctttgcaatctgctccacttcggaatcgcttgcctccggtttgcccatacggatattgttacgcaccgtgtcgttaaacagataattatcctgcgatacataggaaattaaatcgttcagttggtcggtagaaatttcttttacgcttttaccaccaatcgtaatcaatcccccggtcacatcccaaaaggacgcgatcaattttgcaatcgttgattttccgctgccggacggacctacaaaagctgtaatctttccttggggaattgtcagattaattcctttcaagacctctttttcgtcgtatgcaaaatagacattttccagagaaatatcaaggtttggcaaatcgtattttccctctgaccggacaagctccggctggtttaatatcccgtcaatctcgcccattacggtgcctatttttgcaatatcatcagtaaagaacattgcggctacaagcgggcctgcaattcccaatgacaggacaataaccgtaataaaggtagcggatgacagggaaccattcatgtaaaacaggcatccaactggaagtacactaatcagcgccgcaggccatacactcatcataattgccgaatatttttgtgtgtctttcatccagtctaaaatcaggtcggcgtttgcatggacggcatctgtaaatttctgataggaattatccgcctgattaaacgccttaatgacttcaataccgccgatgtattctaccgttgttgcgctcatgtgatttccggcttttacaacttccccatacttcttgggatattctttcatcattcccatgtagcacatcattccaacaggaatggtaatcagcgatactaacgccattctccagtccagaatgaacagataaatgatgattgcgattggtacgagaagatttgaggtcatttccggaattacatgagcaaggggaacctctaactgttcaattcgttccaccatgccattttttagctgccctgacggagtgttgagaatatagcccatcggcactctggtaagttttgaggcaattttcctccttgcctcggacagcactgcaaaggttgcttcatgggatgcccttgtggaaatccccatcaatatcgcttttaggacaaagccaccgccggaaatcaaacaccacatcatataaaatgataaatcccgattcccggagagcaactcaatcgtcattctggctgttgcaaaatagggaacaatgccaaaggcaactcccaacacagcaagaacaacagaaatgatgtagcccgtcttatgcggtcttgcaaactctacaagcctgccaaatggattgccgccctgcgactgattcatataaatccctccttcggttagtttttaccaactttcattcaaaaaaataagccgataatctgtcatgtgatttacacaaacaaattatcggctctgcgtcttagcgtctggcactactgataatcgtattttcatgttgtcagcatctatcaaacattcctgtttgcatttgggacaaaatattggaaagttctttagtgaagtatctgctcgtatctttgtccgcgttctgcatttacaaaaagggcagtgtatccatccgttttcgtccacacaaaagtcttttgttttctgcattttcttcacaccttctttcctattttcgatagtattctttccagccattcccataaaaagagcgcaattcattgatatacttctttgcttcttccatcggcatgtcatggattactacctcaaagatgccggagtaaaaagcactggaaacaacgtgtaaaaatccatctgtaatgcgtccctctgccagagctttacttccagcttgaatcaagaatttttttgtgcagcccgtatccagttctactaatccttctaaaaaatcctgatagtagttttccggtgctctggtaatcagcagcttaaattcagaaaaatactcatagatatatgcaatcacgccttcaaaaccacgatctgaatattccatgattttttcattctgctcgtgctccgtcaaagaagaaaaaccatttaatgactgtcgcaacaactctttcagcccgttagctgctggttccacaagaaatcggaataatccctctttatctgaataccgcgtatatattgtgctggtgctgacaccagcattttgggcaatcgtccgtattgaagcatccgtatagcctttttccaaaaattcttcttttgcgcaggcaagaattttcttgtcaaatccttcaaccctgcttgccatctttcatctccccttcttatcaaaacattgtttttaaaacatcgtatcgaaaacactgtttttattatagcagggaagatttatttgtcaagaggctacttttctcttttagggctgtttcacgaaagaattgaacctgatgtcatatttaattctcattaatacaatgcattgtttgtattttctatctaaaaaagggcataaaatccctgttgatccgtttttggggttttgctgtcaatgttcaatatcagtagaagcttggtatcggactgaagatcattcttaagtcaatttctaaatcatcgcagatatcgtcaataatatctggtacatattcccttcctttctgatctttcatttgaagcagccgtactatgttgtagctacatttgcgcaaggtagacattgtatttttccccttttttatcgtacttttatcctcaccaaatgtttcatccaatacatagtgaagtcggttctctacagtccaatgctgtcttttgtattccagcatttcttctgctgtcaacgatctgcttgacacaaggcctgcccattgtatgtcattccccagttcatccccggcttttggcttttgctgtttcctgctccctttctccaaaaaatctgtcagtcacggtgtgatatcattcccaaattcatcctgaacctgcatgatacgcacctgaaacatccttcctacacttgcaacatgagggggttcttcctgaagtccttttatcccgtccggatcgctgtatgactgacatttcctgtattcatatctctcccggttcttttccgaggtctcaatctcgctgtaatgatcgccatatttatccagaaatccttttttgccattttcctgttcttctgacagcccgttaaacagttccatcacttcctcataaagtgccgggcaattcttttttacttgcagcacaaactccccctcattatcatggattgccaaagacaaactcgattgtccgagaaatttgaaacgaattgagccagtgagtgaaatttaacgattctctcactggttcttttcatttcatataaaattaaaatttcaatcaaataaaaaagtcaacttgtacatatcaaatttctcttcataggttataacttatatttttattttcaaagtataccatatcccatgattgttccgttattaatattatagcttctctggttcacggcattgctggagtttccttctacggtgtatacggtactgccttctgttttctccacgattcccacatggtctgaggttccgtccccgttccagtcaaagaagatcagggttccgggtgctggtgaatatccccggcttttccacttttccttgctctggaaccatgcgattccgtcatcgcacagagagaactttggcatcttaccgctctcgatcagtcctgcctgatccccacaccagctggcaaagcaggcacaccatgccacatgactgtcaaagccataccacgaccagaacttctgaccaccttcatttccaagctgggtaagtgccacggatacaatctgtccgttgccaccaaacaggtcggcaaacaatcctccgctggaataataccgcaggacgtgcggaacgtactctggatcgccataggcactccatccatgtgaagctgcctgctcattggaaaactgcagggcgttttctgcactgtaaccgccatacttccgtatcgcccatgttatgtatccgttgccgtagttatatccttgcagggacagcttcagcttatccatatcctgtggactggtgcatccggcttccttcaggcagtccgcataatactggattcctacctgtatggagtagtctgtatcctggatagcatttggactgtttgcgtaccgggtgttgtatggacactcactactctgcataggatcggttccccggccgccggattcctgcatcatgatcgcctgtatcacggaaacatattcggggattccgtactggttggcatatttctgtatggttgccgtataagaaaggacttcctggctgagtgcttcgctgctctccgagcttccagaaaatgccgcaccgccaacgattccaaccatgatgaccaagagaagaacgataactgctccggcggctcccagtgcagccatcatggactgcacggttttcgctgccgcttccacggcggccttggctgccttgaaggtattctgccctgcccttgccgttttctgcatccggcggacgctgttggaagtctgcatggcagctttctttgccgcctgcttcgctgcccttcgttccatctgcttctgcatccgaaccgtcagggcgttggaactggtcgcacggagcttctgctctggctggacgctgatcttcgcagactggggagccgtcttgatggtacgcttctgtatggttttcggctccggctgtttccttggtttttccttgatccgaatggtttccggctgtttctgacggatggcagtctgccttactgtatcttttgcttccttcttccgactctgttctcggatggagagctgcttcatttctgctatctcctgtccgttctggattcttggtgtctccctggcagcccggatcttctgctctttcgttttgacggcatctgaaaccgccttttgccgctgggctttctgaatctgtacttcccggctcttctgctcgggtgtttcccggctagcaggatcggcggtctgtgtgtcccctgttcctctggcggtttctttctccgcttctttttctacttcttttttgccaacggctctctgtttgatcttctcgtaggaagtctgtgcggctgtctttccggctctggttacagttctgcctgtctttcttgcagcccattcctctgcggatgtgactttcccactggcatattcggatggggactgttctcccatgtcattgtccctggcatttgcgatggtctgggatttttccttgctctccagtatggccgtccgcatcagctccttggggattctggaggcaggatttttggtctttggttttgttgtaacttctttggttttgatatccttcatctctcacctccagtcccggcttgtctcgctcttacgcttcgcccggcttggtcgtcatcaggcggtacagttttgtatttcttggaaacgaattttcaaacggcaccagatttccggaacagcggatcagaccatggccggcacccacattggtgatgtaggataactggttgtctgaaatattcagaagtgccgccagctcatcccggtcggtggtagcctgattcaaaaggatcaggaactcactgttcgccagcatcaggcgggcggtatcggatttcagaagttcctcaacgttctgggtaagtccggttacaaatccggaatacttacggatacgcttgtacaggcggtagaaaaagtccgcactgtattcatagcggaacagcagataaaactcatccgcaaagatccatgtcgtttttcccttcttccagttctggatcacacggttaaaaatcgaatccagtgtgaccagcatgccaaggggcatcagctgttcgcccagctcccggatgtcatagtcgatgatacggctcttcgtgttgacattggtttcctgggcaaaggtgttcagactgccattgataaacagttccgaagacagagccagccctctggcttcttcctccggctggagcatgagttgtcggtacaggtcctttaaggtcggcacctgccctttgtaaccgcccctcatataatcccggtacacatctgcggtgcagcggtcaaggatggatttctcctttgccgaaaggtttccggctcctacgagctgctcaaacagggaaaggataaattctgacttctcaatcagaggatttcggtcattgccataggcagaatccatatccagtgcattcagatgggtatccgaggttgccgagatccggatgacctctccgtttaaggcttccaccagagaagcaaactccgactccggatcgaggatgaggatgtcatcttccgtggaaagggcaaggtctacgatctcctcttttgccgagaagctcttgccggagccgctgacacccagtcggaaagagttgccgtttaacagcttccttcggtctgccaccagcatatttttgctgacggcattctgcccataatagatgcctcccggctgcatgatttcctgcgtatggaacgggatcaggacggcggtggattctgtagtaagggtacgcactgcatcgattttccgcaggccatacggcaggacggtattcagtccatcgacctgttgccacttcaaagttgtcatctggcagaggtgttttctcgcaatggaatacagggtttccgtatcggagtccagttgtttcttgctgtctgccatatgtaccattgtcaggatgccgaacatcatcctctgatccctggtggtcagatcgtccagcatttccttggtctcttttctctgcagctccatgtcatagggaactacggctgaaaagttattgttggcattctggcgtctctgccagttggtgacgtttgtctccacgcccagcagtcggttctggatctcacgcaccgcttcgtctgtcggtacggggatgatatcaatggacagcatcaggttcctgccaaggctgcacagttcggagatcatctcatcctttacatagctggcgtaatcttccataaaaaggactctgccgtactgctcgcccagcttgaaatggtcgttatggaattccatcgtgtccgggcagatccagtctttgaagctgtgtccttttttcgcaaaggctttcatgtcaaatggaaaactctgtggaacgtctgccttgaaaaagtcccggaagatctgtagcctctgctctgcatccagctcttccccaatagaggacagcttggccagatgggtgatgatgtccgttcccacacgtgcgaaataggttctggcttcatcgatgtttttcttgtggacgctgatggtcagatagcgttcctggtagatactgttgttggtaccggagatcttggaaaggagcatgtcattgtactctttccggtactcgtccagaccgtcccctttcatcgggatcagcagggactgctcaaactcttccttgttgatcttacgattgttcagggtgatcttcgccgtacagccggaatccagtgcatttaaaagttccgaataatccaggaacatttccgtcttgtccgctttactggcaatggaatagttgatatccgtaaaccggaatgtcctggaatacttgctctccacctgaaaaataccatctggccagatcttgcgaatcgggatggcctgctggacagacttcggtactttaaatttttccttgtcctgtttcagtgtctgactcagggttttaatcaaaggcatcaccccttcctcttcgcttctttggtttcttctgtttcgtccgcttcttttccagaagttccgctccgtttcccatcattttctcacccagccgcaggctctcttccatgcaggaaaagtacaggttctccgacttaaataccagccgcttcgggtacagcagttcggatttaatgactacccatgcaaactgttctgccgtcatgccgtggtaacgaaaaaagccgcaggctgcaaagggagccgccccaaggatgcacagccatccggttacctgttccccggcatatttccgggtgacaaaatagattccaagggctgccaggatcgccagtaccgaaaataagcactgccggaagcttaagccccagaacattgactcctgatagtctcggatttctttattcattttcacttccatgttgttttctacctttctctttgtaatctctgttttttcttttgtttctgttttggtacatccctttgccggatgccatttctttccataaatctttttgttccttccggatcaagctctgccaattttttcaggtcgaatgtaaccctctggaagatgcagtaaccggaggatgcggtatccggctgtatcgttcccagcttatgctgctttataaaacgaagcttttctttgctgaaattgtggtcgatataggcttcattgataccgcccagcggagcaaaaggcaggtttaccgtaaggtctgcaaagctttccgggtatccatcttccatatggtaaagcccgatatagaggttgtcattgctcatgtaactgtctaccctgagaaataattcctcccggccatactgccagtcgtagctcagtgtctttggttcttccatttttttcgcctcctataatcccatgatttcttttacgatacggtcggatgccttgactgccccgaccagtaccagcaggttaaataccagttccccgacgtaattccagacaatggtcacggcggacaggctggtgtccccgatggccggcggacttgatgcaaacaccgaaaagatgatgcaggccagtgcgatgatggctccttccagacataccccggcgtaggaacggataaagttctttcctacagactgggttggctccccggcaaaggttgccaatggaatcggtgcgatggctgtgtacatatacagcttaaacattctcccgtatacagtcagaatcatgacaaatgacaataccgtaatcagcaggcttcctaataaagttacgatccacaaagggatagattccagcatccccaccgcttcaatcttgtccacgatctccgagggcagctccgttacagttccacccgccatcccggagtgggacatgatatttgttacgatgccctgcacaatggaaaagatcgcggtcaaaagctccatgccggacatgacggctccctgtgccagtgcaaaacggataaaggctttcactacatgttccggttttttcatatccgtgaagctcccacaggttttcacaagccccgccgcaaagaacagaaccagcaggccgtacccgatggctttcagtccaccgttgatgttcgtcatcacgctccagatcgccccgcccttgaaattctccgggctttgcgtcagcagtgtccagatctcagccagcttgtcgctccaggtctgcaaggcagaatttagattctgtacgatccagttatcactcaaacagtttcacctcccatcctcaaaagtgagcagggagccggcatttcgcatggctccccttctggactcttctcctatcccatgatcaggtccaggatctcttttgcaaaggtaataatgataccgcctgccagtgtcagaaatccgtttgccctctggcttggatcatggctctttaaggacagaccgacctgcacgataccaaatcccagcaggatcaggccaatggcgcggatcagggaaaagataaacgtggacaggttattgactacggtcagcggatcgcctgcggcataaacgcaggtcgccccaatgcagatcgacagtaccatgactgcatacagagcaaacagtttcttctgccctctcttcatcttcagcggtgcggtctctttcctgatttctgtgtgtttcttatttttcagtaaattcattggcattcctcccatcaaaaaagctccccgatgatgtcctcatccagaagcagttcgtaatcgtcatatcttgtttcgtcaaatgtaaaatcgtcatgcgccagcggtgctttcgcataattgaacgggccggcacctccgtcctcggtataccggatgttgggatgcttcatcaggtcatacttggcatccagtatgggccgctccccgcggataaacagaagtgcattctggttatccagcatacggacttcatccggctgtaacagctcccttccgctctgctggaagttggtggagtagctgccggattttcctttggtctgcccgtaggtgttggtgtctatggtttctttccccagtaattctgatacatatttgtgtgtctctttttcattgccgcccaggtacaaaaactcatcgcagttgcccaccagactttcccaggagtccttgaacagagcctttagctggctcatgttctggatgatgatgctgcagtaaatggaacgggaacggcaggttgccaggatcttctcaaactcatttggcagggatacgtttggaaactcatccatgatgcagttgaccggaaccgggagggcaccgccatgcacacggtctgccatgtaataaagcgtctggaaaagctggctgtagatcatgcctaccagataatttaaagaggtgtctgcatccgggatacagcagaaaagggcaacttttctttctcccatgctggaaagatccagttcatcagtattggtcagcttggcgatctgcggcagattgaaggctgccagccggacacctacactgatcaggatggacttggcggtctttcctgccgcctgcttgtaaatgtgatactgcttgacggcaatgctgtccgggtcccgcatctccagacggtcaaacaaaatgtccagaggggactcgtagtcctcgtcctcttcttttacctgtgccgagcctaacatctccatgatcatggcgaagttctgttcttccggcggagcttcgtggagcagatacagcatcagtgcctgaagcagtgcggtttcgctcttctcccagaagggatcggaggactgggaacctttgggtgtggtgttttgtatcagattggaaataagacgaagcacgtctttgtcatcgtggacatactcgaatggattgtagcaaaaagatgtgtcgggattgatgaggtcaaagacacgcacctcatatcctttcttttccagcagaccgcctgtctttcggagcagctcggctttcggatcggtgatgaccatcgaacagcagcactgcatgatgtttggcagggcaaagcctctggattttcctgcaccggagcctcccactacgagaatgttgagacatctgcggtgcttgtgggtgtcaaggctaatgcggaagttctgtgtcagcaggatgttctgggagtacggcttctggctatatttcttacagatctgccgggcatcgccccatctggcagagccatgttcttcccctctgcggtagttcttctgactggaataaaaaatgccgatcccggctgcgtaaagtaacgtgcagaccagcaccgacttgatggtatattccgtataatgaaactggaagggatggttcagcttttctgtgagaacctccattagcttgaaaagattcctgcccggctggatggcatccgcaagcaggattgctacccaccagatgacaggcagtccggcaagccaaatcacccagtctgacttccggctgtttgttaccgggatggctgctgtttgggtctctctgctcttggcaggtccgtaatgtggaagctgtccactcccggaacgagggcaaggctgcttccattctcccagtttacgtggatctgccctgcatcgtctaccatatccaccttaccttttaagccgggtggcatgtggctctccccctccatgctgttaagcgtgacctcggttcccggcggatatcttctccgcatggcttctattctttcttgtgtcatatttctgtatatttgtaccacatcctttcttcatcttccccttccacggtatgggcggtatctggatttcatgatctttaacaggacgctgtcgatcccatcggaatagcgtccgtttttcaggtatgtgtcccggagctggtttaaggcttccacggatttgctgtgttcggcttctgtcaggtagagctttccctcttcctgctctgccagcttcagaaccagatcccgtgtggtatccaccggaagcccctgttctttttcctgccggaacacttcccggagtgcatggatcagcatgtggttcatgatccggtccatctttacatatcgcattcttgtcataggcgagcctccttttttcctcttttttctcaaccacaacataccacacttcctcccggaaagctactgcaaaagagccggaaaagcccctttttatcagcgttccggggactttttactcttgtcaggtttctccgttttttcctccgggatggcaaattcatcggtcataaattcctgctcgcttttgccaaggttgcggtctacctgcttgccaatggaataggctgcactctttacatcctggataaaggagcggagttctttcggatctttctgtccgaatgcctgcatctggcataccttgtcaaaggaaaaaccggagacatccacgccgtatttctgtgctgtcacatacgccgcacaataggcctgtgccgatacccctgcccggctgtagcttccatcgtgatggtcaagggatgcacaggccagctcccggctgatggaatggaacgttgcattttcgctcatgccatttcggacatagatcgtccgcttgttcgggatatactgtgcctgtaccttatccggcaggtggtctgcaatctgaatccgtacctcgctgtcggtcagcagtgcttccatcagctggtccatcggctttggctctgcctcttccggctgcttggtacggatctggctgatgtcataggctttctggatggagtacccctgctggatgacaccgtccttttcatattcctgtccgacaatgaagttgtatcccttgcttccggtcttgactaccttaccttcttccttccatttttcaaaggtcttgacctgccggatctccggattctgtgcataaagcaggaacaggttgtctgtcctctgcggcttgcactgtcccataaaatcaaggaatccttttaaggagtccccattctggaagacctcctgtgcctttccatcgatcataccccagatttcttccctctcctgctttttctgtgcggcatattcttctttcgataaccgctgggcggactgctcctgcgagtcctgccctaaaaattttgtcaggtccatctcctacctcgctttcacctttcgtttctttcttgctttcttctgcgttttccttagtccacggttcttttcccggctccgcttctgggattcctctgctttctcccgtttgatgttctccagctcccggcggacactgggacgctcctgttccctctgccctgcatcagtccctttttcctgcccggtagaaatatttctgctgtgcaaggaagagccggacagattctcttcctcctcttcctgcaccgggataaaattttccggttcggaaaactccttttcggggtggttctgattcttttccccttccgaaaaatccatgtcaccgacctggaatgcttcgtccagatcgctgatttcaaactgcacctcgccctccggcatctgcacagtttcctgtactgcttcggtttccggtgcttccattccggcggttacctcatggacagcttccccgacttcgctccttacaaaatcaaggttcatcttatccatgacacggttgactttggctgcatcatcggcaaagaccatgacctcgctcatctccgggttctttttatcccggatgatcacatagagcagtcctcgtttcctgccctcactgcagaattcacgcaggcggtcagatggcacagtgaagaacttcaatggcttgttctcctttaacatccgcaccattctggtcttgcccctcgttttcttctggtcttttaatacggcggcaacaaataccgccagatgctttgccagcgtacccgaaagcctgagcccgtggtccacgccgtccagggaataccggacgatctggtccgccgcatcgcctccataattcatgttgttcacctgctttctgttctcggttttctgtttttctccgtctgttcttcttcctgtctctggatctgctctgccagacgcatcttttcttccatctcctgggactgctgttcgatccggatacaaatgcggatatcctttcgaagcggcttcagttcttcggtgatctgaccgatcctgacactgtccggttcgctccggtagagccgcttccgctctttcgtgagtgcctgtaccctctcttccaacgatgtgcggtaggcgagtagctcttcacgggtagtgatctgatgcttctgtagaaattccatctgctcgatcctggcatccagttttcggatgtctgcccggagcaccggggagatccttttcggcttctgctttagggcacccatctggtacagataggaatagtacagggcctgtatcccttttaacttctttttcggggatctggaatctccttcttttccagcaggtatcctgctcttgggctgcaagatccactgccggatgctctcttccgagtaatgcttcccaaggctccgcagacggatataccgttccatccccggtgcttttaatgcaatgtacttccggttcagcttccactggtatcccctctgcttcatctgttccagaaactgtttccatgtgaagctctctgccacagcatcccggatgtccagacggatcgaggttctccaggtcggctttccgtcctgttctgccatccactgtgcataggatttccctttgccgtttttcggttcaatgacggataagccgtatttcaggcataaggcatccgaagctttccttacatcctcatagtaactcctgctgttgctgtggtactttttcccatcttccatgctcacggaattaaacacgatgtggttgtggtaatgctccgtattcagatgggtggtgatgactgcttcgtattttccctgaaggagcctttctgccatttccatgccgatctggtgagcaagctccggggtgacttcccctttgacaaagctctgcaccagatggtacccctgtactccatccatcttgtggtatcgtttcttcgtagctaccatatcttgataggcagtctcacagacgcagccgatggcatcctcaaaaacggaacgctccgtcttgtcccgattcatggcgtaatcgatggcttcttccagagagccggcactctgccctttcttggtggtcttatccttgtttcggatgtacgtgatggaattgtccagacggctgaccgggatgatactggtgtatgccatcggctaccattcctctttgaccagcctccatgtctctttcgtcatgcggagtatttcccggatactctcttccccggccatcccacagccgttggctacatgggcaagctgattggtgttgttgcacagaccggatattttccgcaaaagctccgtatgatgctcacagggtcttgcccggacttcgccgcccatgacaatggaacggatgtattcctcacgggacaggccgcttttttctacctgctcttccagaaaacgcagctcctttgtattaaggcggactggtatcacatggtttctttttctcatctcttcacctgctttccaacgggttattgatcgtttccttacatttcacggtttttccagatcaggaatcctgtcagcacgccaatggctacggctgcagcaataatctttttcttcatataggcctcaccccctttccggtacccggcacagttccatcggggcaagcatgattcctcttttctccatctctttcgcaaattccagaaggttccatttcttcccatcgatcatggcagattctgcatccagataatggcaggtggatacgttccgctctccatttggggcattctgcacaaggctctccccgtctgaaagccggaacagttcctgtccctgactgtttacaaaacagatgcacacgccgtggtcaatgatctcctttggtttcatccggcaccgctccagtgccttatcctcccgttttcctgagatcagtaaacacattgcaaacacgcccattgcccctccggtcattgtgccaagtataaatcctaacatttcttcgttctcctttcgtctgtttacggctcgatatgggggattggggttctccccaaagtgcgtttggatatccaaacgctatgcttgcaaaaccagtcgcattttgcttcgtcccctctgaacctgttatttctctgaatcactcgttttccttgattttgcttaacccatccagtgtggtacagatgatatggagcctgtcagccatgctgatctccgtgttcatcgtcccggtggtctcttttccgcagacgaccaccatcctgcaccgccttaatatctggtgggacattctccgcatggcctgcatatcctctgcgtccccatcatcaaggaatggggaaaagctatactgcgggcagatcggcacatatcccaattcgtagatcttcctgcagtaccgctgtactttggtctttccctcttctgcagaacagcagacataagcaagtgcctgttccaatacgaccatctcctttcctgaccggacagtttacctctgtccggcatgatctaaaaaacacccacaaagcattctggctctgtggatgtcttgtggacatctggattcttttctttcttttttcagatgtctggcagacatccggttactgcgattcttcgttttccgcttcttccaatgcttccagtgcaattcggacacggtcgcttcccagcttataatacgcatccgtcacttcgatgccgaccgcctgatagcctgactctgccgccgcaaggatggtagtaccagctccggcaaacgggtctaagatcaggccgcccggctcacagatctggatgacatccttcatcagctggagcggcttctctgtcacatggatgcggttctggggattcccataacggaacacacccggaaggcaggacaccgggcggttgatcggcatcgggccgttgcttccccacacaatatactctgcctgctggcggaacctgcctttctgcggacgggagtttcccttatcccagactgcggttcctctccagatccagcctgcccattggagggcatcagtgatggacgggtactgtctccagtcaataaagaggcagatcggagcccctctcttgcaggctttccgcacatcgtacagccattctgccatccagtgggtccaggaacgctgatccttgttatccccatcaaagtccggaagggcattctctgctttcatgctgctgtacttctggttggtggtgcggttgcgttcattctgcttggttcccccggacgcatagggcggatcggtcacgactgcatcaaaaatccccggctggaatccttttaccagctttaaggtatccccatgcaagatacgccagttctcccctccggcagactcatccggcagacagtccggttttaaaagatcttcaagtttcagggtatttcccataggcatcatccttcctcttgcttatttcccagatttctctggaagtgcttctatctatggaactgctcatcggcaggtatcctcttttttgggtacttcttttctcggtgttctgcgctgttcacggtgatccgacagttcggtttccacatattcgctgatgattcccagtgcttcataataattgccactcttgtggacacggtctgccatctcgttggcttgttcggacatcccggcacatctgagcaatcttgaggcatcgccaaggattgagaaaatatttccgtcatgccctaagagtttcagcttcggatgggacggctttggtttcgattgcttttcctgcatctcgttttctggtgctttcacctgtatctggaaatccgagccggcaccaacatagaaatgtaagtataattcaccaccgtctaccttgatctcccgctgttccagactttctccccagccatcgctgtactgccctctcagatactgccccaccacacggtattcctctggggtcagattctcccggagtgtcaggtttgcacagccatataaaacaccctcctgttcttttaccgccattgtaatgcgttccactttttccttaatatccttgtttcggtcaaaataatcaatcaggttgcatggctggttgtcaggcataccgagccggttgatctcgtcaaccttttctgctatggatggctgatactgcaccaggtcaggtccttccaatggttccgcatcatccaaatccacaatgtctgaatagtccgggataaactctgccatcagaggggacagcatttccacttctattttttctttgataggcatcacctcacttcctttctctgccgtttctccggtgtccgggcaaccatctttgccatgtctgcccagtctgcccctttgatctccggcaggttctcgatgatccgatagcttccctcgtaggcttttcggatatgttcacacgcccaccgtccggcaaagtcattgtcggtacacacttcgatctcggtgatctccgggtgctgggacagaaaatgttccaatgcctgcggctttttcatgctccgctggctctgcccttcttttggtgcgctgatcccgccaagctccagacggtacttatcccggcttccctgttccagtgtcatgtgggcaatcacatccacacaggcttcataaacggcaacccgtctgcatcctgtttgtgccggaacacaaaaagcgtatgccttttcgcttccggcctgttccatcttaaaagactttccgctggcatcgtaaatcccacgcaggaaagcataccttgccacctgattttcgtccttgcctacgaacacagcattgtgatagggcaggctttcatacaggattcccagatgaacacactgctgtaagacctcactgctgatgccccgctctttcagatatcggaacaccctgcggcagtccgggctggctggcggcaagacaaacggcttttggggctttgtctccacaggcggagggatgtaggtgggatactcacctttcagcatttgcactgcctccagaaaggaacacccatctacatggatcaggaaatttaaggcactggttcccccgatatctcttgatttccagtgccactggctggtgagctcgttgattttaaagctatcgtggtctgtcagctcccattcatttctggctgaagattttttcaggcggttcggctggtatttcttcaggtactcaatggcggtgatctcccttgcccgtttgatctcttcttccggaatccacggcattacatcacggtatcccggagctgctctgccttatccgttttctcccacgggaattcctttcttccaaaatgcccgaacaccgcactctgtcggtagattggccgcttcaggtgcagggtgtcactaatctggcttggggtaagcccaaacaccagaggaatcgcagcggcgaggcagtcatccgcacagatctttccggttccaaaggtatccacctgcaccatgactggctgggcaaccccaatggcataggcaagggacacctgacatcggctggcaagtccggcagccaccatgtttttggcgatgtaacgggccatatacgccccggatcggtcaactttggaacagtccttcccggaaaatgcaccgccgccatgcggtaccaggctgccgtaggtatccaccatcagcttccttccggtcagtccggtgtctgcatccagacctccgcacacaaatcttcctgatggattgatcagaatcttggtatcctcatccggcggcagcatccgaagagccgggcgtaacactttctcccggatctcatgctccagcttccgaagggatttttctttttcgtgctggcaggatacaatgacggtatccagacggactggcctgtcatcttcgtattccaccgtgacctgtgcctttccgtctggcaggattcccatgatataaccgcttctgcggcttgcagacagttccctcacaatgcggttcaccaaaaccactggcattggcatgagctgcggcgtctcatcacaggcgtagccaatcatgatgccctgatccccggcaccgctggcaagtccgctctgaacagaaacagtccctgctctgcgttctctggatctctccactgccccggcgatatccggactctgtttgtggatgagggcatccatgtggatttcctctgcttcatagcctgcactctccagcacctttttgatgatttcaaacacctgtggctcaaatcggctggtaatctctcctgccacaatgatgttccctttggtcgccagcacctcgcaggccaccctggaattttcgtcctctttcagacacgcatccagaatgctgtctgcgatcaggtcgcagagcttatccggatgtccttccgttacggattctgctgtataaaatcgtttcataatcgttaccatcctttctaacgagtcaaagctcgttatcacataagtaaatagatccagcagaaagcactccttttggaacacttcctgccggatcttggttgtgagctgtctcacattctgcacttttcgggggctttcagacacttttcgctaaaatactcccaatacataacctcacataatctctctgttttgaacactttccatcctgtacaaccattatttgtctcattttccgcacttttaggggattttcagacactttttctgtcagagcattggcagataggtcgtagagtataaccagagttccctcttttgaacacgttttccatctgaatacacctggcacacatccctgctatactcccctgttttgaacacttcctgtcccgtgcggtcattatttgtctcattttttgcacttttcgggtacttacgaacacttctgactccacactgccccggaaaccggcaccgccaggacgatgttcctggcaccgctccattcatatgaacacgtgacgagcgtcaaaaccttatcgtatatacacttcaggtaatcatccccggtttcgaacacttccctctgcttagctacttttaaatattcctgcactgcctccgcatctgcgagtttctgctggaatgggaacaaattcctgtctgctttcagcaccgtgacaattcggtattcctgaatgctatcctctgtctgaagataagcaaagggatgctcctgataatatgtttcatctgcatagaagtccagatttccgaacattgccccactgttcatgttgtgaccgtaaatgataaggttccgactttcagacactttgcagtctgcctgtaaaaacaggcttccgttgatgtcatattcctttttgtaattccgtttcaggtaaaactccccattctcctgttcggactgaagcaccggataatcgattccggtatctggtatcgtcagccatccctgcacatccaggtattgtttccgaagagtaacaaggtctaccgcagccaccgggcattttcttccagctggttggtctttcttttcagagcctgaggctcccggagcttccggctccgggaaattccctttcagctctgccaccagctttttgttttccattggaagatataccatgtggtaaatcagaaatccggcacttaagaaaagagcagcaagacataccgcttgaaaaagttttttcacgattttcatcgttcctgtccggcttttctcttctttggctgactcttctgtgtctgtcccggcacaggcggtttccttgctgctttcaggattggttctgttggaatctgattctgcctgcagccctttaagattccggtcaggtacgaccgtccgggcggattaaagttctgcatgtaatcttttgtcatgatatagacaatggctttgatctctcttccgcctttattcttgacggtgatttcctgtttgtcgtaaaaatcaggatagccttcataaagatccaggctcttttcgcagtccccggtcagtgaccagaggacgccgtccacatggcttccctcttccgggaagatggtggcaagaccgcttcctgcacctgcaaaggtcagccgatacccctccaggcggacggtttctaccacctccgcctttgggcaccgatatgccatctggtccagatccatgttgcttccatacgcaaaatataattgtttcagcctatctgcccccttttttcttctttcttctggatgccacactcataccaatcagaccgcctgcggaaagaatcaggcacagggccggaatccagaggttggtgtcatcacctgttttcgggttgcttacagacggggtatcctccggcagcttctcgttcgtcactttctggatgacttcgatcactggagttttgtcatctacataggtaaatgtcacctcatgtttggtcccatccagctgatagccctccggtgctttggtctcaaccagataataggtggctgccttatcaaatttgccgtccttataagttccgattgcaagcagtccgctggttgcatggccgttttcatcagtggttagggtttctaccactttgccatccgcatccctcagttcaaattccgcatctttcagtgcagctccggtatccttatctgttttctcaacgatcagacgtccctttgcggtatcatctttcatggctaccttctggatctctgcggtatctgccacctcgaaggtgatctcttctgcaacaacataaccgtttggagcctgctcttctttcagggtgtattcaccgatcggaagtttttcgatataatgcggctctttaccggaagtccaggtttctacgatgttgccattttcatctgtgatggtcagtttggctccttcgatctcagtatctccggtaatatccgttttgctgatttccactttggtcacgtcatcttccatcacctgtttctggatctctgcggtattttccacggtgaatgtgatgctttccgcagtggcatatccatcggccggcttggtctctgtcagggtgtaagattttcctacaaccagttctttgatgatgtgcggctcctcggtggatgtccattcctcaacaacacccccgttttcatccgtcagctgtaatctggctcccggcagttcctcgcctgtggtcagatcggttttggaaagttccacggttgtcggctcatcttcaaatacgaactcataggacacttctgcttctttgtctccctggtactcaaaaacaaattcctgttcttctccggtggtgacaaatccatccggtgcatacagctccttcacataataggttccgtcaatcggcaggtctgcaataaaggaaatctttccatctgcatccgttgtttttaattcgatcagggtatcggcctccatcagcacctttccagatgcggacaggatatcgtttctggtgtacaaaccaaagatgccgccttttaatacacggtcggtatccttttctttcttcaggacgttcacttttaccttctggcggttgttctgccagtcctcatcgtatacgacaacaggggtatcctggtcacggtaggaaagatctacatatcgtggttcatcatccaggacgtaaccatatgctgtgccgacctctttgacatagtattttccaaccggaagatcagatacttctgcaatgccgtttgcgtccgttgtcacagttgctaccagctcatctttggaatagtaatccgggcttacgccatcggctgctttgatatcctctgcagcgtaaatctcaaaggtaacgtctgacaggcttcctgtgatgtactcaaacagatgctctacaacgcctttgacattgtccagcagggtgatcttatcaaggaattcacccttcttgtttacgatcagcagtgctttcggcacatcgtctttcatttccactttctgtacttctgcggtatcctgaacggtgaattccacatctgtggtctttaaataaccaagcggtgcaagggattcacggaggatataagtttttccaacagtcagatatttgatcacatgaggctcatcctttacggaagtccagctgtcgatcacatttccatccttgtccagaacagaaagggatgccccgttcagctctacgcctgtggtcagatcggatttggtcatctcgatggtggtcggctggttcttcttcacagatttcagcttgatggtcggaatgtcctgcccctgataggtggcatcaaattccagtacctcatcagaggatacaaaaccgtccggtgcggaaatctcttttacataataagttccaagcggcaggtccagggtaaagtgtgcctgtcctttttcatcgcttgtgatctcctgtaataaggtatctgctttcacgatgaccttgttgcctgatttgatttccttcttattgtaaagtccaaatacagctccggctaccacgcttccggtttctgcgtcctgtttttccacggtgatgcttactttctggcgttcatttttaaatgtcacttcttcgtctacgaccggggtatcctgtccggcataggtaaaggttacctcttcccctttggcattccaggtgtagccttccggtgcttttttctcttctacccggtatgttccgagcggaagattctcgattacggcacttccggtttcatcagttgtcaccgttgccaccagtgtgtctttggcatattccagataacggttgccgttctcatctttctgatggtctgcggtatagatatcttctgcggcataaacctcaaacacggctcctgcaaggctggcttcctcataggtgaaatccttgtcaaaacctttgactacttctccttccttgtggatggtcagtctgccttttgccgggtggttctcgaattccacctcgatgatcaggtcaccgctgaccggatcttcctggtatgcggtatcgctgtctaccttgatttccacggtattggcactgtgggtgtatccatccggtgcagtcacttcttcgatgcggtaatttccacaagccagattctgtggcaggatcaggtatccattctcatccgtaaaataagatttatgtaccgtagtagatgggtaggtggtcacctgttccacatatttcttgttatccagattgtatactttaaactcggtattcggaaccaggacagatttctttgtctcgttatcttttttgacgatctttaattttgcttcaaactcttcgtccagaagcacacgccatacctgcggctgatccggattgttttccgagatcacaaccttaaagtcatcgactggtttgaagttgtgcggtgtggtggtctcccttacaatgtaggttccgtatgcaagcggaatggagcatgcatatccacgctcatccgtgaacatttctgtctgtccgtctgcggtcagcacgaccggagtagcagatgcaaagtcataggaaccgtccttatttttcttcaggctgctctccagatatgcactgaatcccacaccttttaacagatcggcatcggtcttaccattgttggctgctttaatgacctggaacggctgtttgatcacatcttccagagaagttgcggtacgttctaccgtctgaaccagatctccctcgtcattacactccagatcatgttcttccgtgtctgccagatatccgacaggcggagtcagttctttcacataatactttccgagatagaggtctgcgacttctgcatttccctctgtatccgtagtcagggttgcaatctgtgttcctgccgggtaaagaacacctgtctgtccatctggatgtacgatatcttcacgggcatacaatccgtaaacagcaccctcaagtgttgcatctccctgtgcggtctttccggtttcggaatcctcttttaccagtttgatcttcgcattgatccgctcattctggaacgtatggttgaaagaaaccgttgcctctttgtctgttgtgtactggaaggtaaaggagtacacatcctcgccgtttctcacatatccagctggtgcacccagctctttcatgtagtagctgttgacgattggcaggtctgcctgatatacggcttttccgtctgttccggtcactgctttctcaatgagagtatctttcttgaccacaatggttccgtccgctgctttgatgtcatttccggcatacagaccataagtgccgcccggaagatatttcctggtttctttatcctgtttgtatacactcacgcttgctttctggcggtcatttttgaatgtcacgcttcccatgaccttttccacattacttccggcataggaaagggtgatctcctggctttcaccagtgcataccagattttgtggtgcctgcatttcttttaccacatatttccccagatataacttatccagtgtggcacttccgtcatccccggtggtgagtccggctttaaccagtgcatcttttttgtagatgattgttccgtctgcggatacaatttcctctgcagcataaacgttgtaaaccgcgcctttttgtttctgctctgtataaacaaaggaaacaccatcatcggtcacctttgctccggtcaggacttcgcctaatttgtaaacggtcaggcttgccatctgctctgcatcggtaacggtctgttttacggtatccccgatgaccagtttcacatcgtaggctttggtatccagcagatatccgtttggtacggagatctctttcaggtatacggtatcctgtgttttggtgatcgtaacgctggaagctccgttagcatctgtggccggcatctttgtgatcaggttctttccatccttgtcactataaacgccataaactgcacctgcgatggctttgttgctcttacggtctttctttacgatctccagagttgcctgttttacccatgatactttaaaatctacatatttctcatcggtcacaccctcgccaaataccagggcaaggtcctgtgtctcgcttccggttgtgatcttataagcggaataatctttgatgatgcttcccttcatggtgacagaccattcccctttgacattcactgcctgtgtcagcggtgcagataagtagaatttggtaccgccgcagatctccacggatgcacctgcactgcttgtttttcccgttgtcacattatgcagtttgacaccggacggcagcttcatggtgatggtctgcagttcggatgccttgaaggtgatctcttctgttctctggctgttgccgctgatatatgcggtaacatttgcattggagaaactcatgtccacttccggtatctccggctggctcatgcaataattgtagagttccattgccagagcctgtccggttgcattcgtaccggaaaaagcgtcactactgttattggcataagacgcagccagatggacaatgataaactgttttccagcggaaaaatcaggatgtttctctgagaaaaatccattttcgccggatgcttttgtgccgtagtagcatacttttgccagtgctttgctgtcacccagtttggtgatcttatagacaccatccccaggtcctgccttggacggctgcacacagtaggcagttgcagacacgtttccaaattttacggtatatttataagttacataggaacccagaccgtagtctgcataatagtatgcagcccctcttgtcacacctacgtcctgtgttgctcttgtactggtattgactgcggtgaatgaaacggtttccccatcttccattgccatcaggtcaatatcctgttcccctgcctgctccagaacatcgctgagtgtcagcccggattcttcatcggttgtattttccgtttcggattcctctaatgcagcatcaaactcggattcggaaagtccgtcctgaaattcgggttctgtttcttccggttcttctgtttcagattcaactgtctccggctcaacaatttctgtctctacaggcactgtctcagtttcttcctgcgaggcagcttcctcatcatcagaacctgtatcctcttcggtaactgcctgttctgtctgcggttcactctgagctgctgtcacaggctcttttacgatcaggtttctcccaatctgataaaccggctggttctggttgactggctccacataataaacggcatggtaagtgtctgcatggctggtgctgaagttctccccggcgtcattctctgctttctggaatgtcactttgactttgctttcgtccttgatttccaaatttgtaaaatccgtggaaacatcaaagtcctgtccgacttccagctccagatcggtggcttttaccacttcattttcatccagctgatcctttacggattcatacgctggcggttccgccgctttcggctcttccgaagcatacaccgtcagcggtgaaatgaccgtggataagatggtgactgccgccatcacccctgaaaggattcgcctgaatcgatatttactcttcatgttttctacctctttcttctttttcttcattttgcataagaacagccggatgtttccacccggcctgtctgttctcattattctgttatctcgcatcatctgtccgtcttggattctgcagacaggcataggtacttttgtcataccgccatgccttatccccgtccagattggcaagcagatgcttccgcacatttttgtattcgtccccgatcaatccgaggcggagcagaaaggtgcggaacgtaaatgccgggttatccccgatctccgtcttttttgcatgggtacaagattggttgatcgcctgtgcggatatggcaagtgccagtgtgatattcgaccggacttttcctgcatggagggtgctttcaaaacaacgccattccagtgttcccttggaaaaaacagcatgtaggtttaaggcataataccttgtccagttgtaatgctcggagcttccgtcatttccctcataccatgcccttttgaatttttccatcgtgatggtgctgtttggcatccggcggatcttctccaataccataggacggactttctggcaatactcatcttcccttctcgtctgtacatttaaggctttgaacagaatatcctctttgcagtacatgatcgtcagtgcatttttcagactccttggtgtatgattggatgcgtccacatggacatgcatgccacaggatgaattgacaaaagcacctgcgtttttgacacaccgcaccacttcctggagtttccccatttccgaatattccaatttcggggataccatttctgtcgaataatctccatcggcatctattacagtaccatttgccagcctttcacagtcgatactgctgtctcttgaaaatttccacgtttttccatctgaatcttttacacaccatgaatcgtaagaacggatatgatatggctctgttccgaacattcttccaatcgcaacagccgcatcatagcggctgatacctgtcatctcaatctctgtaccaaaatactggtcttttaggtcgatctgcttcacccacccttcgcttctggaacaggtgagccgctttggatctcttcatctactgctttcaaatttctgcctattgcttcaatgacattgacagtgacaccattaccggcctgcttgtaaagctggttatccgatgtttctttttccatcttggaaatctgaccatcccgatatccctgcagccgcagacactcccttggcgtcagcctgcggattctgccgtggtaaatcactccatgacggtcagttgccgtaatggtgaacattggctcttccggttctttcatccttcttccattctggcggactttttccttggccggtgtcagcactgcccttggcgcttcttccaccagcaccccggaactttcgcctctgtggttatggatgctggaatcctgtctggtattcagacatcttgcaacgtctgtcaccagcggcggaggggagatatctacaaaatgcagtgttccctgctggtttccggtcgtcagggtatgggcgatctcatgcccgactctccccctgcgactgttgattcccggatatccgagatcgatgctgtccccctcgtaggccatcttgtatccttttcgggtgttttccttgattgggataccgacttcgtataatccggtcttgccgcccataccaccagccccgctggtcagcgtgcagctcagtccttcttctgcgtagactctttctccctgtttgccagcatggacttgtataagagctgttccatttgcttttgggaaaggtaatatttttccggcacatcttccatcaagatatccgacaatatacacccgcttccttgactgggggactccgaaatccttgctgttaagcactttccattcgacatgataccccagttcagatagcgtactgaggatggtgtgaaacgtccgccctttgtcatgcgaaagcagaccgggtacgttttcaaggagaaaatacgcaggtcgtttgtctgcaaccagtctggcaacttcaaagaaaagggttcctcttgcatcggcaaatccttcccttcgtccagcgattgagaatgcctggcaaggaaatcccgcacataaaagatcaaagtccggcattcgttctgtttcaatatttcttgcgtcattgcagaaccactctccttccgtatcaaacagcacccggtagttgtggtctgcatatgcatctgcttcacagtgtccgacacaggtgaagccccctgccctgtgcagcccttctcggaatcctccgattccactgaacaggtcaaaaaatcgaattgttccggctatcagcctcccttcgctgcgaaaaaaacagtgcagatttctctgcaccgtttccgtctcttggtttctgttttgtgatgtctattcttctgattccgcttcctctggctcagattcttctgcttcttcggtttccagttctgttggctctgcttccgctggctcttcgttttctggctctgtcggctcttcatctgcttcagcttcgtccggttctgtcatttctccgtctgtttcagcttccagtgcttctgtctcaggctcttctgcttcaggttctactgactcttcatccggttctgatttcgcagtctcaggatcttccatttctgtttcttcggcttcctctgactctgctttccatttggcttcttctttttcgattgcatcttcgataagcccgattaagaagtctttctgtttcatgccattcctggcgaggactgctttcagtctggaaaataaatcctcggttacctgtactgctactgttcttaaatctgccatgttcgtcttttctccttttcttgtcatgtgttcttcgattaccatttcaaggtattttggtatgctgattcctaactcttcgacttccagttttagcttttcatgcagctctaccgggatttttccgcatatgtttttcatctccattgtgttcgttctcctttcttttttctacatacaacataccctaaaacctgacagaaagctattcacaatacccaacgaatatgaggctctcaaaagctcccaaaggatgcagatccaataacattcaataggcatcacccctttcaaaaatccgtgatttatactaatttgactgcttgaaatttggctattttatcaccaggaaagacttgactttttcagaatgcatcctcaagcccggagagaaaatccagcatctgggacgggatttcttccttttttgaaacactctccccggagccagaaatggaaacacctgccagttcttcccggattgcctgccggatgcttttctccagctggttgttttcctgatcttttaagatcacctgaaccagatagctgctcttctgtccatctggaacactttgcaggatctcccatgcctttttgtgatctgggttatcaaggttcaggcggaacgagaaaacgggtctctttacttcgcgcacatctgccccacaatccgctcatagccggaagcattggcgtgtacgtctgtcaggtaaatctgccgacacagcccgtcctgcggtgtcacgtgccgtttcagaatgctggctccgccgcccatgatcacggacggaattgccttcagatcgaacccggcttccataattgcagacagtattttctccgtgtagagccttccctgccggacaatgatttcttttgcggccgggtccatgctgcagctctggccgttcagaacacgttcgatctgaatatccgttacagacagtccggtatttctgcgtacctgctcggtgatctcatccacacaccggatcacaccaagttccaggctgcggcaggtagcggcatttggaacactgttgtccagccgcatcaggtctacggtccagccaccgatatctgcgagaagaacagaaggctcgtcccgaacacattccgggtggagagccagggctgagtatccctgtgggaacagttttacatcctgaatccggatctcatagctctcatcctcgtaccggaaacgcagaggctgctctttccgaaacagatattcccggaagccttttttctccctgccaaaacttgccagtggaagaccggctgccagaactacatctgttttccgctctccccggcgatagcggatttcctgggcaatggctgccattgtcaaaagataataattgtcattggaagtcttacttctcaccagcgtctgccgcccggttccacacacataaaatttcccattgtactgcaggacattctgcatggtatacggctcgtaatcgtatccggtcagtccggtcgggaaacatacatggggagtttttatggcataatatccatggtcaattcctataatgataagtcaccacatcctttctggtttttcttgttcttttccagcaggtggtcttttggtctggaaaaagagaaaaagggcagaaccccgaagagccctgcccgtaataaaaaatacagttatgtatatttacaaacaaatatgcataactgtatgctatcacttttaattaatttataatttggattctctatttctgttcttgtagcacataaatactgctttaaaatgttcctactagctgcctatgttactattctttatttcaccaattcatgaatagcttttaccattgtaagtccataatcaacaaggaaatttttttgttcttcggagtatgtctttcttttctctattgcttcatctgtgcaatgtctaaagcactgcattttctttctataattctttactatcgtatcgtcaatgaagccacaacatacatcttcatattctggtgtgataaattttccatcttgtttcaacaggttttcaataaggtttgcaatctcagcaattttttcatctatatgcatactattgaaagatgcctgtctagtagaaatttcaataaatttctgatttatagaatcgttcacctcaatattacaagacttttgctcaaatgtcagatctgctacaaaggttcttctagtcgcataacgaacagttccattatcatctccacctagagcaataattcgatttctaatatctctatatgtaaagtctgttggatcaacagggggccttgctagtattctaggaaactcttttatctcataaccgagcatatgtagataatatgttattagataaaaccaacatttattttcacctgaaaaatcaacatctggctgacacagttctttaaatttagttattgcttcttcaacatcataaatctcaaattgataattctgagtttcctcttcaccacaaaaaatattatatgtataatttacctttttaacagattccagaaaacgataatggtattcggattcctttatattttgaaaataaaattcttttaaatccatgaacatactccattcaaaaatcaagccacaacatcgacaattcagcatctcttctcattttcacaaattcttctgcaaatgtttttgctgtttctctattatgatctacatcccaatgttccttattatagtttgcagcgtttgtccaattgaaagtaccgtgcattgcaacttctaaatcgatcacacaaaacttcctatgcattatatttttgtaccgctctgacatcacatccacccgataaacctcaaagtgatcttccaaagtgaacgaaggtttctccttattaacacgattattatcaataataatttttacatctaacccttcatttctttttttcaataattcatcaaatatttttttattggtgaaccatgccattgctatccaaattgagaactttgcttctcgaatttcatcaattatccgattttgtatatcatcaaaaagtatctcttggcttacttcttctggtgcaatattaagtattccgggttttaataccaatccgctatactcattataatcgtttggttcataaacctgtttgcacaaatcatcaacaaaatcttcatgttctttcaagacaattaatttatctggaacaacgctaataataatatactcttgacgatgatctggcaaatgatatgtaaaagtccattccttttgaaatgaaacagaagcaactttaagcgcctccaccacctcatctttatgctcataatcactcatctttgctgttgctatcaataaatccttatactgctgttctgtcataacatccccctatagctttatatatcgcaatgctatgagcaatttctttatcactactcattatcgtatcatttcctaacaaaattcgatttctaccactaatgatatcatattttttatttataatctaggtcttgtatccactctccgatctcttttggtgtgcttttgcaaaaatcctgaatccacatctcatggagtttaacttctgattctgtactatctatgtttccaacacacccacctgtttcctgaagtgcttccaggcaatcccattccttttggaagtccccagcaaattccatccatacttttatatgatattccttaaaacctaaatggtaaatcaagtaggtcaacctgtcaaaatcagctaacggcattttttcttttttcagcaataaccttttatcatgctcgctgcatagatataaaaatgcaagctgctctatttttgcctgctccatatatttctcccttctcttctgtccttgtctcacttttacaaccgattctaccttgtccaatcgttaaaatcaatacagatggtgcaaaaagtgagacaagccatcctttaccagagaggaagagatttaagatgccaaagccaaggacacagtctggtgagaagaatctgattagccagcgattgattgaacttcgcaagacccacaatatgtctcagcgtgatcttgcctataaactccagttagctggttacgatatggataaaaatgtaatcaccagaatcgaaacaaacaagcgttatgtcactgatcttgaattaaaagccattgctgaaatctttcaggtttcatacatatttctcattgatggcaaagatgaatagaagtgacaaatggggaagttcctttcgtgcttccccattttatccgtccttattacagattcagtagttctaagattttctgcataccggcctgatataaagattccgcatataatatccatctttcactgacttctgtaacatatgcgtctatcgtttttcgcttttcttttgataatcccattgtctgaacctgttcttcatattttgatattttttccagcatttcctggtacactgcattttctttcagctgttcttctacatcatcaatccaagtatccatcagcaactccagcagtttctgtgtgtcaccatcatcctttcccagtattgctttttttattttccccagcatagctccataagaaatcatttgagcctgtcccatataaaaatggtactgttcttctatcatttccttttcgctctccagttggaaatatcggtgcagtgccttatgctcttctgtctttaggctgattgactcattcgactccataaatgtttctatcactggatacttctctgtaagttccagtattttattttgcagtctctggtattccgcatcatgctttttcagataggtgcaaacctgttctcctatccgtatccccaagcattgctcattccagatgatatctggctgtgttgtcatatcggtgtctcccttctgtgtagttttcctgttccaagcacaagactataccacacttctgggagaaagctattcaccaaacctactgaaatctcctggcagatcctgtgcaacctatcccttttcccacaaaaaaactggtatgaaagactccttgttctctcataccagctatctatttcttatttaactgaatacacattcttttctattctctgtgtatcctgtacttatttatggcaaaaatcagactacagacacgctatacactcttatgctacataatccagtttacggcaaccgggttcaaaggtcacattgtaaataccgacttgctgcgtagaaagtggtgcgagatagctttgtccgataaaatatttcgcaaaggcgtcattgggtgtgccaataggaaataccatctcgttctggtgtttggcttttgcgtcggcggcatcgtcctccgcccatacctcctttgccatacggaaggccgcccatgccttgggccagcccgcataaaatgccgaatgtgtcaggatctccgcaatttccgttttggtcacaccattgttctttgcagttgtcaggtggtactgaaaggacgaatccgtcagcccttgcgccatcagcgccaccactgttacaatgctacggtctcgcagggaaagcttgtcttccctgctccacacctgcccgaacagtacatcatcattcaattccgcaaatttgggagcaaattcccccaaagcctctctgcctgccgtttgtttaactgccatggctcacacctccttgcccatctgataagcttgctccaatgcaatatgacctgcaatctctcccacgccgtttacgccgcctgcaaacactgtgccagccagcgcacagcgtgggaagcagtctacccaaccctgcacagctttctctgtgcccgcaaaggtttccggtgcgtcctctgacgctgttgccagcaagtagactttcgtaaagacgtagtccgtatcgaacaatgggttggcacgatccagcatagtcttgagctgaccgctgacgcagtaatagtagacgggtgttgcgaacaccaacacatccgcatcgtgcattttggtggcaatttccacggcatcgtcctgaatgacgcagtgccccaacttcaggcaggcaagacagcccttgcagaagccaacctgtttttcccgcagatatacggtttctacctgattgcctgcctcccgcgcgcccttggcaaatgctgccgccagcgtttcggagttaccgcccttacggggacttgaggaaatgattagtacctttttattcatcgtagaacactccttgcatttttatattctctgtggtattctcatggtatcacctaaacctgactttaggtcaagatattttcgaaaattttgggagggaaatttatgtattcaattggacaggtggcagagatgttcggattgcctatctccacgctgcgctattatgataaacagggactttttccgaacatggaacgggtgtccggcatccgcaaattcggtgacacggagattgaagcactccgggtcattgaatgcctgaaaaaggctggcatggagatcaaggacatccggcagttcatggattggtgtgtagaagggccgtccacctacccgcaacgcaaggcactgtttgaggagcaacggtcgcacatggaggcagagcttgagcagatgaatcgcactctggatatgctgaaattcaaatgctggtactatgagcaggcaatcaaagacggcagtgaggacagactaaagtcactgattcccgaccacttgccggaggaaatccgaaaagcatatgaaaacgcgcatagctaacctttccgtattccgtattgtctgattttgtcgatttgttgtgataaactatacaacactcctgattgcatgagaatcagtctgaaaatcaaaaagaaacggcggctctgaaaatcaaagccgccgtttcataaggcgcgtgaaaatatgtctgctgtacgacggcttttttcttttgccgtcgtgcggcagattaacatatgaaactataattcattgatagttgcagtaatcgacatattgcgaattcgttttgccggagcatatacagctgcgattgccgcaatcgagacaaacagaagaataacgcccaaagagataattgggaactgccacacagcagatggaaaatgccctgcaataaggaaatcatacagcgatttgctaagcggcaagccaatagcacaaccaacaacgcacccaaaaacagcataggtgaatgcttcacaagcaatcattttcgtcatttgccgttcatccattcctactgcccgcatagctccatattgcttcattctggcagacacactcatggaaatgctattgacaatgttcattaccgttaccagtgcaataattgccaaaaacgcataaacacagaaaacaaaagccatataagttcccgtagtgcgctcatcgcgtttgtctcgaaagctatatgtttgatctacggaattctggattgcctgaacattttcgtccgtaacatctcccgttgtttgtatcagcacaagagaataaccttcctctcctgtcaaacggacaaatgtttcatcagaggtaatcaatgtgagctttccatttgtcaatccattctcactaaatgggtcgttttttaacagtccggctatggtaagggtttcatccccaatctgaacagtgtcaccgattttccatgtgctgtcctgatcggatgttgccaaaacaaaattgctgtccccaaaaacttttgacagatcactcccccttttcaaagcactgtcttttttcagacattgtaaatcaaaatcatcataagaaatcatgtcggttgtatcggaaaatccggtatcgctatttaatctggcaggaacatcaaacgcactacgccgcccgtaaacctctctcactccatccattgcacggatggatgtaagcaattcccgaggaatcgcattaccgtcatcacttgcaatatcaatatctgatgtggcagctgactgaggtatcaaataatccacaaaatcgatcataacggaaaaactcaaaaataagatgatactaagtgcaaaagaacctgtcatcaggaataaatttttcttcccggagaccgcatggtcgataccgagaagcgcttcaatctttccgaatcctgtatactggcaatgatacattgtttttccgtggtctgcatttccagacaccgctgtgataggagatactttcgcggcatgtttcgccggagcatttgcggcgatcagtacagtaaccagtccaacaaagataccgcagacaatgccaaaaatactgatatcaaagaggggaatatcagaaaattcttctctgactacaaagcgtagtaccgcacatagcccccatgttgtaacaacccctaaaataagaccgatgggtacagccgttttgcaccagttcaatgcctccagacgaacaaaccgaataatctgctgcttactcataccaatgcaacgcatcattccaaaaaatttagttctctgggcaacgctactgttcatactgctggaaatcatcaaaacgcctgcaaccaaaatcaacaggaatagagcaaccgcgacagaaagaagggtttgtcccattgaactgccgagcaaatctccaatagagaaacctccatgcttaccaaccaatcgagcctgttccatccgaaaacccatttctgccatactgaatactgctgttaccataaacacagcaaatacaatgcaaagcagcgtcatacgattttgtcggcggtgaactttagcggagatgggaataagactaagatagcttttcattcacggcacctcccaaaatcagtcaaagtaccatccgatacctgtaatacccggtctgccgtttgcgcaatactgcggttgtgggtaatcataatgatggtctgctcgtattttttcgatgtttctttgagcaatgctatgacctcactgctgttttgtgagtccaaatttcctgtcggctcgtctgccagaatcagagaaggacgggtaatcaatgcgcggccaatcgccactctctgctgctgaccgccggataactggctcggcaaatggttacggcgttctttcagattaagaacagtaagcagttcttccagatattttttgtccggcttctgatagtcaagcagtacaggaaaaataatattttgctctaccgtaagctctggcacaaggttgaacgcctgaaaaataaatccgatatttctgcgacggaagacggtcaacttcttgtcgttcatagaaaaaatatccttgccgtcaatcaataccttacccgatgtaggcgtgtccaatgcgccgatcatattcagcaacgtacttttaccagaaccggattctccaacgattgccacatattctcctttgggaacagaaaaactaacatctttcaaagccttgactgtggtttctccgctgccataggttttacaaatatttttgacttctaataagttcatcgtgcaaacacctctttctcaatgattttgctgtcgtaaacgggtaaactttcgttcctgtctacgatggaaagaatagcaccctaatattactgtagccctacaaccagcctacaattttgtaggaatcagaaaattcattgtgaaagttgtcccgatacctaattcgctgtcaacctcaatggtgccgttatgtgcatcaacgattgcctttgccaaaggtaatcccagtccaatcccttgcttgtccttagaaaaacgactgcgataaaaccgcttgaagatgtgatgtatatcctctgggtagatgccgcatccattatccgttatcacaatttggacaccagacggcaactccttccacgcaacacgaattgttgcaccactttctgtatggtcaaacgcatttttcacaatattgtcgattgcctcattcaaccaatcacgatcacaaaaaagagaaagatgatccgagccagacagaatgatttctttcttttcctgtctggctctatatgcaaaatgcagttcaatatcccgcatcatatctgcaacattttctgcgttcttttccaagacaatggctccggcatccaatcttgtaatcttgagcagactttgcaccagcacttcaatacggtccaactcctgctcggacagattagcaaattctttcacagatgacacttctatatcctcgtcctgaagcagtccgttataaatgttcagagccgccagtggtgttttcagttggtgtgaaatgtcggagattgtatttttcaaaaactctttctctcgcaactcgttatctgcatgggcatttagcactgccgctaaagaattgatggaatgaaacagtcggtacaattcgccctcattgtcacattcaatacgggcattgcgatcaccatcaagatacgcattgatttgtaatatcgcctgctccatgatctgattttgccgattaaaatatacaaagcagactgcccatacagcaccgccagccaatagaaaaaggattagcaataacagagaaagccgacgatgtgacagccatagaaaaacctcggctaagagaaatgtaacccccaaaaccagtgaaagcgaaagaaatagatttttgatttctttatttgccagtatcttcattctgcacctcatccgataatattccatttatatcccatacctcgaacagtcaggagcatttgtggttcgcttggattatcctcgatcttcatacgaagccgacgcatatagaccgtaagggtactattgtcgatataattcccgtcgcaatcccatagcttatctaaaatttgtccctttgtcagcaccatgcttgggtttctcataaacaagcacagtagcttgtattccgcggcagtcaaatccaacagctccccatttttgaaaacctgtccttgtagcaaaagaactttgatgccatttgactgcaattctgtgtctgctgcttgaaaagaatttgcacgtcgaagtaaggcgttaatccttgaaatgagaacccccagtttgaacggttttgtgatatagtcatcacctccaatatccagccccataataatacttgtttcctcatccgaagccgtcagaaaaataattggcacctttgatgtaaatcgaactcttttgcaaaattcaaagccagacccatctggcagagatacgtccaacaccaacaaatcatattttccgtctgtccacaattcctccgcttctttgagcgttctggcgatatttaattcaaatccctgctttttgaaagtaaaagaaagcccgttaatcaggcttagatcatcttcaagaagtaatatatcactcatacttttctgcctttccttgttttgttcgaccatcaatcggcttttccgcatcctttggaattagccagatagttgccatcttcacagcgccggggatacgcccagcagcgcaatagtaattaactctacgaggtgtcacgccccatttttcggcggcctcttttagtgtcatataatccattatgcacctccacagagtacattatagttctttgtctcgaacaatacaagtttatctgttccaacgcaagcgtttctttgttgtatagttcttcaggtgtttttgcgtagataactacgaacttaccattcgcgtctttgattctggtcctataatataggacacctcttttcataactgtgccatattgaggaattattgtttgccgtttggccaattccgtcacctcctaagaatagactccagcgctgtatctatgttttatcagaccattatgatttcgacaaggatacggaccggctcacactccagctctgcgaggtttacgataagttgcgttcttttctgctggctttgctctgtgggtgcattttgcgatatactcctaaaggcccgctgaagtaaagtacacacagccattctgcacatattgcacataagaaataagaccattgttacgggccgcgtccagggttgcaatgctgatacctaaattattaacactgacaaaaaaggcaaaaaacaggcgcatcaaatgaaattttatcaaaaatattttacaagctgctttaatccacggcgaatactgtctcggacacggcttgggtctacaccttctacttcggcaatttcgtttaccgccattcccagatagtatcgggcataaattcgctttgcctgtttctccggcagtttcatcacagcggcatagacctgctcctgaaactgtttttcctccagaagcatctccggtgtctgcgacttcaacaacaccgcattttcaatgccattctcgcaatccagagaatactgtgctttataacgatacatctttcgctcatacgcagcctctgcacgttcagctgcccgaatagtctccattacctcctctgtcacatctacgaaaaagtctgttacataaacatcaggataaagttcccgaaggttaattttcttcattatgtacctccatttcgattcacgggtgattgacgagtgaatcgaatggaggcggagaccgacaccggcagacaaccgggtcatctccgaaaaaatggcaacaaaaaacaccagatttccgtgagggaaaactggcgcgccaagaacagccattattatactgaattacatggaacgataatgccgatgcaatgttatacttgcccggaggaggagcaatgctttttttaactgatgtagatcatgtgagctttgaaaaagcaaacgagacacggcaaaataacctccaatcggctaccgtgtccctgctagtcgtcattggtttgtgcaaacgcaaagaaacggcggctctgaaaatcaaagccgccgtttcaaatgggcgtgtcaaattgtctgctctacgacggctttttttcttttgccgtcgtccggcagattgtagctttattctttacctatatgctatatggaaagtttgtagatttcataaagatttgaaaaaataatgagcgataccacagtaccacccactacttttaatatggaattttgataataacctgtgcgccgccagtccttttaaaattgcttaaaacaagctgcccgccatgttgcttgataatgctgcttgtgatataaagtcccataccaaagtgcatattagaagtacggcttttgtcgcccatgaaaaactgttcctgtgcatgatgtagagcctccggtgtgaagccgcctccctcgtccgttatagatatatgcaaaaagcagtccgttttttgcaccgttacataaattgtcccctgtggtggagaatagtctaacgcattgcttatcacattcataattgcccgttccaacagcagcttatccgccttgagtgtgcccaggttagcccccgtttccagttgcagacaaattcctttggtaaggcataaagagcttgcctgcgctttaatctggcccatgtaatcagctatatcaaatttctccaaatgaagctgatacccggcgattgtccgggaaatgtcaattaacgctttaatataaatgcctatccactcggagctttcagtgatgtaactcgcatatagacgttgttcgtcgtcaagctccgtttcatttatcaaatcaatatttccttgaatgacggtcagaggtgttttcaaatcgtgagcgagtgctgcaatctgttctctctgtaactgttccgcgttccattgcttctctaaagatattttcagattatctttcatatttgcaaaagaacaaagtacgtcctcaaattctttgatttttgaatgtcccacttcaaaatcaagattttgttctgctacctgccttgtcgcttcaaaaagcggagagagctgcgtccgcatattttttgcaaacttcgctgtcaatatcacgcatactgcaatacagttgattgctataaaaatataaagtagaatttccggtgagggaaaatgcccataaagccattcatttgtaaactgtgaacctatgtaatattgcagcactacatattcattttcgcgggtcacaaacaaatactgtttgttgaggtttgaatttatcttcccggatattgcgtattccatagcccggtccaaatcgtcgccctctaaggtcgtttccgtcacttgataatttttatccagcaccaaatattcacagcccataggaagctgcacatctgccaaatccggcgttgcggcaataacaggagcaagatcttttgtgcagcgttctgaataatccgcataggtaataagccctgtactggttccagctaaaataagactaaatggtattgccaccgcacctattagtccaatcaacagcatacataagaatttccaaaaagacgctttcagtgatgttgtttttttcattcccatttatatccaatcccccagactgtcgctatcggctgaatatccagtttgttcaattttgaccggatattcttgatatgagtagaaatcgtagaattatcactgtcgccctctaagctgaaaacagcttcgtaaatctgttcttttgaaaatacctgtcctttattccttgcaagatattcacaaatcagatattcgcttttcgttaaggcaacaggcgtgttatctacccgtaattctttttcagataaatcaatttttatgcggtcaaaggtaagtgcggtatgtcgttccctacgttcacgccgtaagtgggcgtttactctcgcccgcaattctgcaatacgaaatggttttgtcagatagtcgtctgctcccagaccaagcccaaatgtgatgtcatgctccattgtctttgctgtcagaaaaagaataggacagtctacaagggaacgaattttatcacaataggaaaagccgtctacatctggcatcataatatccagtataatcaagtcatatctgttcagcttatcaagcggtacctgtgcggcagaggtataagtggtcacgaaatgcccatcctttcgcagcccgtttttgacaagctctaaaatagcccgttcatcatcaatcataaggatcgccgccatattgttgcctcctttcgttgtcctttttagtatagcacaagctccaagggtaggaaggtaggaaagctgtcattgtcgctttgcaatatagtagttatcatttacattgaccgcaaccgcttccgctttatcggttccgtaaatctcatagacatctgtgtaaaaccaagactctcgcccctgtccggcattttccccgtaccagtcaatcttgcttaaatcttcttttgacaaagggattttcgtttctgtatcgaatgtaacactttcagcgagaatatcaatgtagctgcctaattcatcatctgataccatatcagacgttacttgataaaccgtcccgccccaaagaagttgtgtcgcattttctggattgacttcaaagctgtcatttatagattcttctgttttcttaaaatcaaaaacagtatcgctatctttgacattttcgctgataacagctttatgataccctccgtttatatctacaataagataatcgtctgcgttaggagccgcatatacattgagaaaaggaataatgtaagcggcttctggtgctttctccgccaaatccgctaagaattgaaaagttgccggttcaacattttcttgcagcaatatttttccgttctcgtctatggcggcaagctgccggatatatccaatccattctccaagcccgccatttgatacggtatctgccaaaatggtgtaatcgttacctttataggaaaaacgtgttacattttccgtattcaaatagcattgttccttgtcactggaatattcttcgattctgtcctgtaaagtacagccagcaagagccacacaaacgataaaggtaaacagcagaagtagcattatttttttgcttttattcataattttttcttccctcccaatgagaaaaccataataaggtcagcaataagccgcctgtcgttaatactgcaatccatattttttctgttccatagttgaaaatttgtcggctcaaaatatcctgtacccaattcatagaccatgcaaaggggatataccgggctacacctttcagctcaatattgctatataagatacattgcagactttcaaacacgccccaaaacagggataaccctaatccaaatttgaagctaaggaacaggtgcaagatgtatattataaaattacaaaaggccatcccggcggcggctccaatgagcattccgagctgcactgtatcagccattcccaaaagatgtatgccaatcacaaataacaggaacagaaagaacaatgcaaatacccccgaaccataaagataagttaattttgcaagcatatttttgtgtctgtttggtacagcaagcagcgtttggaagtgtgaagccttttcttccagtgcaacgttcagaccaacaataacgcttatcaacaccggaaaaaacgttgtcgtaatttccaatatcattttgagctttttactgtctgcggtgctggcatactgggaatagtaagcaagaaataacaatgcccccataacgggtacacaaaaatgaatagcccaaaacgatgtatgcttcgttttttcctgttcagaacgaagcgcataaataaaacccatttctgtctacctccctttggaaaaatcctttgcgtcggcataggataaaataagaaacaagagtattgacaacgaaatggaaatcataatggctatagaaaatccacaattccccgcataagttccgtttatttcaattcccataagtggctctgccagttttgctgcccaacaatacggtacaaaccaccatgctattgtatttcctaatgcggtagcagtagataggacaatcccaagtattgtatttaacacaatcggcacaaacattcccgttttgcgtgctaagtacagacacaaagggatttgccagacagacgcaaggataattccgatacttcctgtaatgctgtgtaaaagagaatatactgccgttgccggagcaatgatattactgatagaaataagcaatgctaaaaatatcgctgaaacaagcagtttttcgactaagataatgcccttggcaaattcaaatctcgaaagatttacaggcatagaaaataccgaatagtatttcccggcgttttcttcttttctgtgtgacaaagaacacaaaattgcgattgctcccggaagcaggaacgcataccaccagtaaagcgtcatgtactgataccccatatatccacccataagccatgcaaaaatagccgtaattagcggaacaatgaaaatcagtttgttcgatattgtcctcttgaatttcaaatgttctgattttagatagtccatgccttaaccctccctgtgattgctttttacaacgtccataaaaagctgttccaaattttcgtttgcattaagtttcccctcatagcctaagacgccgcccgcaataatgccgatgtggtcagcggtctgttgtacctcggagagaatatgacttgataaaataacggtaataccctttgcaggaaaggaacggataagctctctaagttcttcaatcccaatcgggtcaagcccgttggttggttcatcaagtatgagcagcttcgggttgtttagtaatgcaactgcaattccaagacgctgtttcataccaagagaaaactgtccggcttttttcttgcctgtttccgtcagccggacgatttgcagcacttcgtcaatccgcttatctgtcaaccctaaaatagtagtccttactttcagattttcataggcggtcaaattttcataaagcggcggcatttcaattaacgctccaatatggtttaagtcgctgcgcttccatgcgtggccgtcaaactcaatactcccagatgtgggcctcaaaatacctgttatcattttgagtgttgtagattttccggctccatttggtcctaacaatccatagacggaatttctttcaatgttcagcgatatgttatttacggctgtctgcccgttgaacgatttgcagagatttgttgttttcaagattatactcatattttgtactgtcctttcttttggtttcaacaagaggatacaagggaaatttgaagatttcataaagatattaaattttaatctgcataatcaaacctattaaatggccaaatatagataaggcgcaagcccctgtgctggaaacattttgagaccttgcgccctttgttattctatcctaaaaatactttgccagctgcttcagaccgcgccggatgctgtcacggacacggctggggtctacgccctccgctgcggcgatctcgctcacacgcatacccaggtaataccgggcatagatccgtttagcctgcttttctggcagagccatcacagcggtatagagctgctcccgcagctgcttttcatccaaaagcatttccggtgtctggagtttcagcaggatcgcattctcaataccgttgtcgcagtccagggagtaatacgccttatagcgatacatcctccggtcataggcagcttctgcacgctcagcagctcggatcgtctccagcacatcttcggttacttctacaaagtaatcggttttgtaaacatcgggatataagtccctaagattgactttcttcattatgtacctccatttcgattcacgggcgattgacgagtgaatcgaaaggaggcggggatcggcatcggcatacttcgggaggtttcccgaaaaatcgacaataaaaagcgccagctccccacaatgggaaactggcgcaacaaatatgactatgattctgctgttttagttggaatgataatgccgatagatagtcatacctccccggaggaggggcaaggctttttttaattggtgcagctcatgggtgctatgaatgacgaaaattgacatggcggtatcctcctataataccgccctcctgatcgcatgagcatcggtccgaaaagcaaaaagaaacggtggctatgatttttctcaaagccgccgcttcataggcgcgtggaaatgtgtctgctgtacgacggctttttttcttttgccgtcgcccggcagatatagataaaacttatattagttacgacttgttggattgttctttctcatctgccacacatttaataatgtgtgctttttgctccgatgaaaatcgaatggtattcatcgcccgtgtatatgcttctgcttctttgcttttctgaattgcctttagcataatgtgacgctgggcacactcgtttacatggggatcgtgagtgacaacaacaatcgtttttccttgatagttcagctcttgcaaaatctccagcacataatctctattacattcatcaaggctgccggttggttcatccgcaaaaataatttgtggtgacttagcaatcacttttgctaacgccacacgctgttgttcaccaccgcttaatgtataaacttttcgtttctcatatccctgcaaaccaacttgctccaatgcgtcagcaatcagacgacgctctttcttcttgctaatagatttgaaatgagttgctatccgcatattgttttctacggtttctgtatcaattaaaccgtagttttgaaataaataagaaatatggcggcggcgcagattaactgctgtacaggaagaaaaggccgggttcttctggccacataggacgacaattccgctatctgggcgatcaagcaaacccatcatattcagcagagttgtttttccagcaccgctttctcccataatggaaagaaattctcctcgctctattttcaaagagaaattttcaaacaaagtcttttctccgaaccttttgcaaatatttgataaaataatgtctgccatatcattcagctcctttcactatttgataaaggttattttgggtatatcttcggctaacgctcaaagtgattgccagttctccgataaatgctaccagcagaagtaaatagtttaatgatacttgcattgtcatactcacaaatcgcaagcctaccacgacaactacataatagataaccgttacaatcaaatgatttcggatgcagtggaacatagaatacccttctatcaaacaacaggcaatcttatttttatagttttcgcaatacagtttcgcactgaatataatcaagcaaaacagtccaattagcagaacaaccgattgtgtaccatatagtagcagcatttgtcgttgatggttgattgtttctaaaaaactggaagcgacgggaggtgtttccagcgtaacagaagcgatccctgtttcctgtaaagttggaagtagctctgcataagcgttttctgttggtacattcaaaaagtaggctcctttggaacaatagcttataacaaagatcccctcaagctgttcttcctcaattaccaagattacaggttcatccaacgccccatgatcgccagttcctgtgttggcattgtaggaatagactttattgttgctcccgtcataggggataaaattcgctttcatcccgtaagctgtctgaacaaattcacaccacttttctttttccccctcttttgatacgggaagaagcacattaaaatcggtaaccgaaagttgagtatcagagatttgctttccgtccgttccatagatcgggttgaagtctaaataattgcgattgaccgtaatagaggtctgcccaaattcttccgcaggtgtgcgtccgttaatcaagttatattcataattactggcatccaccaagataccgttatagcggtttaccgtagcggaataaaacgctttgtagttctcgttcagattttgcatcgaagcattacttgtattaacaaggacagttacatacccggacactttatctgcaaaaaattgagatgtctgcattgtgtgataagaaattgtgacattcctaatagcgatggataagaaaaaaataataaacccaacaaatacacctttcgcaagaatggtagtaaagtaaatccctctccttggaacacgcccctttatgtgttctgcgctgttctgtctacaaaccagcagcgcagaaagtccaaatccacacagcacgaccataagcagtacagcaatgtttggcagagaaaacagaatgtattgcagtaatgcagtttggtacagagctgccgctacaattagacttacaacttcaatgattaaaaaacagatggcgaatatcgggaatatacttttgacttcatccgcaagaacatcatgcgtagtataaccctccatctttttcaaaacatttttcttgccatttgaaagaatataaaatgccatgcttgccaccagcataaatgcaggaacaaaaccgaaaagtaatacagaaaattgcccggaaatataggatgtcggatttactgtaacaacataacccagttgtgttatagcatcaattatggatgattgctgccccattctcacataataggtagccgcagaaaggtcatattgcttcgcatcgcctaacggataaaaggaaatatcctgcataagcgccgatgcgtttagccgatgaacattatatccagcaggggttatcgtggatatacattcgccgtttcctaattgagcatttcccttactggtgctgattttcaaaaaatctgcggtatgactggttttgaaatactgatagtgagctttcccgtttctattctccacacggcgcaacatgatgtccgtgtggagttcttctgttacacgctctatctctcccagaaaatctgtagcactgatatttgatggcttttcaatgacgattgtgattttatctctctctatccgatcaagcgcatcaaaggcaaaattgaagcaggacaacgctgataagacactaaagaggatgataaaacaaaatgtcattagctttttcattttgcatacctcctaacaataaaaaattccccttgtcttgatacataaagtatatcaagacaaggggaaaagtgtttccgcttattctgcgtgccgtatgatttctttctgactaacttcttacgattttctgactgccaaatggaagatgaataataaactgaatattttcattttcgctatatgttgcaatcgttccatgatgcagttcaataatctcctttgcaattgctaaccccaaacctgcccctccagtatcagaagaacgagccgcatccagtcggtaaaactgttcaaatatccgttccaacttttcgggcggtatggtttgtcctttgttttgaacgcagatacgaataccatcacttatctgtgttagcgaaaaaaagatttttgtgttagggtagctgtaattgactgcatttcgtatcaagttatcaatggcccgttctaatttatctgcatcacacattatttcaatgttctctgcaatctgcaaatcccattccagccctttttctgcaaggattggattaaattcataagtaatctgcatgagcatccggctaagatgagtttgtgtaagctctaatgacaatttctgtgtactgaaacgagtgatctcaaaaaactcattgataagttcctctaatcgttgagctttcttccgggcaattccagtatatttacataccagctccggtgtaatctctggttcatcttcaatcagtttcaaatatccaagaacacttgtcagtggtgttttcagatcgtgggcaagatataccaataaatcatctctacgctgatcggctatctgtgcgtttttcagactttgcaatgtttgttctctcacccggttcaaatcgtcctccatattttttaagttgcctgacaatatgataggggcatcagttggatgtgccagtttttgcgccgcctccgccacctcatccaaatgttccaaaggccgcaacataaaacgataagaaatataactgcaccctgcaatcgacactacaaccataatagggatgaggaagggcttaaaggcttgaaatgcttccgcctggtcaagattagttgcccccataatgattaaaaaaagtaaattgagtaggatataggcaacttcaaagagaatgatgatagtaatgaactggattgtcgtttttatggcaaggcgcttgtgaaaaagcctgcttccagttccttgttctttctgcttactcaatggtatagcccaccccccaaactgttttgatatatttaggctttcgtgctggttcgctcatcttttccctaatacgggcaatatgtgccataacagtattgttattgctttcaaaaaacctctcgccccatactgtttcaaaaagttcttccgcagataccacacggccatgatttttgcacaagtaccatagaatgttaaattcaaatggagtaagcggtaacaccacaccgttcaaagtgcatttatggctagctggacagatgtaaagtcccttttcatcatattccgcgggttctgcggtaggatcactttgatttgtattatactgtttatagcgccgaagctgtgtttttactcgggctacaacttccagtggattgaatggcttgacaatataatcatcggcccctaatgtaagtccctgtatcttatctatatccgcgattttggcagttagcataataatcgggaacaagtgcttttggcgtatcttctgacagagagagaaaccgtctatttccggcatcatcacatccaatattgcaaggctaacaggttctttttcaatacaagccagtgcatccagcggattataaaatttgcggactacatagctttcatttttcaaatatacttcaaggagatcggcaatctcctgttcatcatcaacaattactattgtttcacttttacaactcatattcatcacggattctttctccttttatctgatggcttttccgcctctttgggtattagccagacaccagccatttttacagcaccagggatacgatcctccgtgcaataatagtttatctgacgggtggaaatgccccatttttcacttgcctctctgagcgtcatataatccatatccatacctccaacaatcctctctattatatttcatttgctcgaagaatacaagtgcgtaggtagggcgcaaggccctgtgccaaaagtactttgagaccttgcgcccattgttatgctatcctaaaaatactttgacaactgattcagaccgcgccggatactgtcacggacacaggtaagtttgcatccgccattacgctttaatgatatatttccactcaattctctaatcggcataatcaagcctattgacaggcataataaggttattcctttgtgcaaatcggcacgatagaatatatttgaggtgagtgattatgccgattgatgatttgactgctttagggcaaaaaatgcgggaagccagaaagaaaaaagacctgacacaacaggagcttgcggatctgagacatgtttctgtaaagcaaatcgccaatatcgaaaaggggaaaatgaatccttcttatttgattttgagagcattggcaaaggtcctgcacatctctttagatacgcttataaatccagatatttctctggaagatgaaggtgtcaatcagatgaaaatgctttattccagctgtccgccagaaatgcgtgacaccctgttgcatgacacccaagaaacggtgaaagaactgacagagttgtccgaaaaatttgaaacgaattgagccagtgagtgaaatttaacgattctctcactggtttttttcattttcggagaaaagaggcaagcaatgcctgtgttaatacacacaggcccgcagagaagaaaatccctccgtgattttcttctctgcttgcttgttgagggcagcgcccccaagcccctttgaacacagaatttcattctgtggctgcgcggtctccgttccactccggtcggcactaagcgaacatcccccggatgtccagtgcctgcgaacgcttttgaccaagaccagcttaccgctggccgtggtctttttctttttcaacatcctgttctacctccattttcagcactcgatctacattggcctttgccgttaaaagctcccgcatttcctcaagggaacgccggtactcggcatagatctttttcttttcttccagcaatttcgcgtactccgtctgcaactctttgaccttgggcagcttcttgactcccatctcatcaaaagcattcttggcagcctggtggagcagaatttcttcctcatgctcctcccggaatttcttagagtagcctgccttgcggtatgccacatagacctcacgggtcttggcataatttacgatgtgagtacgcagaacagcaatctctgccatgcgcttttcagccgctttgatctgcgccgaaagctcattgtgatgtgccgtggcagccgcagccttttcttccaaaaccgcatactccagcaggttatgctctgacaagtaattcatggtctatgccatttgtttcagattgaaaaccttggcccatcgagcatagccagcaccttttcctgcctgcaattttgcctgaatatccaccagcagattgaccttcggcggctctgcctgtgtgactgttttctttcgcggggtatgtgctttcttccctaagagaactgcccgcaaatcttccaatccatatccttcgcccagactgtccatgcgggcggctttctcccaaccagagagtttcagtcgatacgattttccgcgctttgagacttcacaaccatactcttgcaacagcttcagcagttcttcaaaatcagcaggactttgtgataatgcgttgtcaatcgccacacgaagcagctctcggtgagagggctttgcctgatcgcccagccatttgttatagctctttccgtgaggtttcggattctctacaatggacagttcattctcaatacagatggtgtcacttagccggcgaaccgccttggtgctgccccaaaagtttcggaatttccggtcatattctaagctgaccgatgaccagataatgtgattatgaatgtgcgacttgtctatgtgagtgcagactacaaaggcatgattgcctttaataaaacactttgcaaattctacgcccagccggtttgcttcttccggggtaatctcaccagggcggaaggactggcgcacatgataggcaatcacatcatctataccacgcactcgtccggtagcggcaatgtactgccgctttgccagaaggaactccgcatccgcagtccggctgtcacacgcatagccggtaatgagcctgccgttatctgttttctttggattggccacatagtcgatgatgtcactgatcgcccgactctctgtgcggcctttgccgacatgaagcggcatgattcttgtagttgccataatagaaggtcctcctctcataaatatttttgttttcgctgaactctttgcttctatcgttgcaataactttctccgctgggtataataaaaaagaatattctacaacctcaaaggagggatttctatgatagaacagctcattgctgaagcaaccgaatgtgatttcaaagttgctctcgaaacaaaaaagccaaaaagctggttaaaaagtgtcagtgccttttccaatggaatcggcggcactctgtttttcggagtctccgatgaccgggagcctatcggcttgtccgatgttcaaaaggatgctgaagcaatcagccgcttaatcaaagaacgtatcacaccattacctcagtttatcttaaaaccattacaggaagatggtaaaaatctattagctctggaggtttctcccggccgtagcaccccatattattacaaggcagacggcgtgatggaggcatatatccgtgttggaaatgaaagcgtaattgcccctgattacattgtgaatgaattgatcttaaagggaaccaatcagtcctttgataccctaacaacagacgcggtaaaaaaggattacagctttacacttctggaagcaacctatctggaacggaccggtctccgctttgagccatccgattatgtttcctttggtttgactgataaaaatggacttctgaccaatgccggaaaactcatgaccgatcagcacacggtttataactcccgtatgttctgtacccggtggaatggcttggaaaaaggctctatctttgatgatgcgctggacgataaagaatacgagggaaatttgatttatttactgaacagcggcagtgaatttattcgcaataattccaaagtccgttttgtcaaaaaggcacagtatcgtgtagacaagccagattatgctgaacgagctgtgacagaggctcttgttaatgcgcttatccatcgtgattatattgtacttggcagcgaaatccatattgatatgtttgatgatcgggtggaaatcacatctccgggcggtatgtttggcggcggctcaattcaggaatacgatatttacagtattcgttcgatgcgacgaaaccctgtgatcgctgacctgttccaccgcatgaagtacatggaacgccgtggaagtggcctgcgcaaaattgtcagtgaaactgaaaagctgcctggatacacagaggcatataagcccgaattttcctcaacagcgacagatttcagagttattttgaaaaatgtgaattaccatcttagtcagaaagacttagtcagtgaccaagattgtgaccaagttagtgaccaagataaatcacaggacatcctacacgcagtcttggatttttgtataacagaaaaaagcaaacaagaaatttgctcgtttattggttatcgaaatctcacttattttacaagaaaatatttgaatcctctactggcaagtggtcagcttaaaatgactattccagataagccaaacagtcgaaaacaaaaatatattacagttcgttctgaataaacagagaagcagggcattgggtctcatctcccattgttctgcttcttttcattccaaattatattcacatcatttacccatacacccaatcctgtatcgcaaatttcaaattctgcaccttgcccagcagccagatcgcagccagcggcagccccatcgggctaatcaaaaatgccataaccagcaaaattacaccattctgcgtggaataggtaataatcacagccacgccaagcagagcaattatcgtgctgagcagaccaagcaccagaccggatatgtagatcagccccgtgcagagccagacaaaaagcgtcaacaccaaaacgaccggtgcagttacgatcatcagcagacatttcaaaatcttcattcctgttcctccttccaacgctccagataccgtttgcacagggcatccgcttctctctcatcatcttccgtcaactcccgtctgcctttggtcagttcaatctccttttttcgcgctgcttttcaagtttcaacacctccttcgtcagatttcgatacccctctgccaccttgccgccagggtcatgggcgaaaatattttttccctctgcgctaatttcctttgcacggacagagtgtggaatctccgttccaaagactttgattttacttccataggtgtcccgcagcaaagcagcaatctctttggcaaagttggtgcggttatccaccatcgtcagcaggataccgtcaatctggagctttggattgatctgccgtttcaccttactgaccgtagatagaagctgttccagtcctttggcgggcagatactctgcctgaacgggaattatgatcctgttcgcagccgccagcgcattgaccgtaagcatccccaacgaggactgacagtcaatcaggatatgggaatattgtcctttcagtgtatccagatattgccgtaaaaatattgccgtaaaatcatttcacggctcatggcgtttaccagagaaacctccatatcagaaagctgaatatccgcaggcatcaggtcaacgccttctgcatgatgcagaataccttctccggggcgtataggctgatccatcagaattttgcccattgcatccgacagtgtaaatggcagcttgtccggttgcggatttcccaagctgattgtcaggcttccttgtgggtccccgtcgatcaaaagcactttctttccggcctgtgccagacctattcccaagttcgcacaggttgttgttttgccaatgcttctccactcccgctccggtcggtgccgaatatgtgccaccggcacatagcaccctttctggttggcgatggcgatcatttgtgtgttcatgacttcacctcatttctgattgttactattgtttctggacgagatagcaatctcattatcgcggtattcgcagaatagatatgcaagcatatctgcccggctcattactcgcgtaaatagaaaaagccgccacttcaaaatcataaagtgacggccctttctaatgccggaatctctgaaacaaaaaaacacccagttatttgttactgagtgcctgcattagaatcgtatttaattgttctctggttgtcctattttttaaccactagggccgttttttgaccccatttttgccgattgtcctatatttaaccactaaaaattggatgaaatcggctctcgattggtcaaatgggggcaaacttttgtcacccgtttagatatagcaaaagcccggaaaaccttgattttccgggctttttgaaccattttgatatagtctgagcagtcgattatcgcttgctgaactgcggagcgcgacgagctgctttgagaccgtacttcttacgttctttcatacgtggatctcttgtcaggtaaccagctttcttaagagttggtctgaattcagcgtctgctttcagtaatgcacgagcgataccgtgtctgatagcaccagcctgacctgtgaaaccgccgccgtgaacattaactaatacatcgaatttctctaatgtttctgttgcaacaagtggctgtctaacaacaacttttaatgtttcaagaccgaaatattcatcgatatctctcttgttgattgtaatcttacctgtacctggtgtaaggtatactctggcaatactcttttttcttctacctgttccgtaatattttactgaagccattattctctctccttccgatgtaattcattaattaatacttgagttcaagtacttctggtttctgagctgcatggttgtgttcaggacctgcatatacatgaagcttcttgatcatagctcttcctaatggtccctttggaagcatacccttaactgctaatgtaataacatcttcaggtttcttagccattttttctcttaatgtagcttctttcataccgcctacataatcagagtggctgtagtagatcttctgatccatcttcttaccagttactttaatcttgtcagcattgattacgattacataatcacctgtatctacgtttggtgtaaatgttggtttattcttacctctcaggattgctgctacctgtgaagttaaacgtcctaatgtctgatctgcagcgtcaactacataccattttctttcaattgttgccgggctggctacaaagcttttcatagtgaacctccttattcgtgtatctaatcgtataagaaatactagctccctgatgtaaatgtccgaaaacatcaaagctcactttcatctgttgatctcgtcaatcacaacaaacgtccaacaatcagatattttctaaaaaatatattgttcaaataccccaccggggctattggcgaagtatttttaaccatactgtcacaattacttattatattgcaaatatttttatctgtcaatgtttttattgcgtattcttggcaattttttatttttatttttcgtgctctcatatacctaaatagatacatccttttgattgaaaggcaaaaaaaataccagagtcctcttactattttattaattataaaaatagaagaaacatctctggaaaaagtcggggtgacaggattcgaacctgcgacctcttgatcccaaatcaagcgctctagccaagctgagccacaccccgatataaagcattataaaataaaaaccatgcaccttcaaaactgcatatcataaaacactctgccatagaaccgctctcttaactctggctattttcgggtatgttctcttcgctccgctctgagaacgaccttcgaactaaactcagtctccactgcgttccgccttcgttgcctaaagtagggaaaatccctcgctaaaaacagggaattctgacgctttttttagggaaaagtgcttgacaaaaaacatgtatctcccatttgagatgcagttcgagagaggtaactgccacggcgtccaaacaacagcttatgcggattaccctgtggaaaccacttccgtaggaactgtgtaccgcatgggagtggagatttcatacatatatcacatatccatgttgaaatgcatattttcatcgtttataataaaaatgataaaatatcgccgtatagtaaggagctattctaatgaagaagaaaaccgtatcggattctgatataaaaaaatacctaaaaatccaaaaacataacctttcaaatatctattctcaggaagaagtttcacgtatcctgtcattcatgcgcaatgacatatatgattacattcagaatcatccaggatgtcaaattaacgacattgacgcatacctaaagatatctgatatttactctgattggattgctaattcagacgtgtctgatataattgaaaagattgatcatgaatccatatcgaagagtggtggacgatttattgttgttatggtattactgattatattgtcttatattacatatacaggaatcgaaagatatatttttgatacatcttggaatacaatgcagcaagtagatataaatgcaccggaggtcaatagataaaatggtttatcaaaagcggaaaattaataattatttaaaatcgatcagaaaacagttatcattggtctattctgaagaagaaacagacaatattattaacatgttaaacgagcagactcataactttataaccgatcatccatctgcttcaatagaagaacttcgagaacatctaatgaataataaccaatttgtaaaatatggtctcgaaaacattgatcctaaagtaattgaacgtgatatagatataacaagaagattaagaaaaagagccaaagtcatatctattattgctttgataatctttggtgtgtttgtagctggtggtatctataatgttatttatgtgaaacaaaactctattgcttattacaccgaggaaatcatcgattatggcgacattccatcaaccgatgaaactgattcaaccgaattttcatctgaatctccttccgaatccgtggaataactgaacagcttaatccaatactttcacaatgatgaggcctgtcagatatatgaagcccgtccattaatttgcagaaagtactgggttttggatagcctgacagattgtcctcttctatccgacgttccattgtccgagaaaaatgcaaacacggcagatggcacgttcctctttgtattgcccggcacagataaaaaattttatgttggtggccatcctctggtgtattggattgggcatacagaaaatggacagccggcgtctgaaaaaatgaaaagattgtacgaagcagcgttttctgaagatgaacgtcagttcgcaaaaatgttgcttttataaaaaaatatgggtacataaggccacattagcgtctgattttttcaaagataacttgtctgtgtggcagccgctaatatggctgtacccatttttaagtcaaaaagcggcagaagcgaacaactcggtcattcaatggccgagttgttgacggtaggactgattaatttttcaattaactgttttgtcctccgcttctgcaactgtttccaaagcaattgacaatgcttcaccgtaatctgaaagtgctcttgacagaggaattgttacctgaaagaagcttccgtccgccttccttatctgaagcaccttgatatcctgtctttttcttgggaatactttccatcctttgctcatcaggtattgcactagcagagtaagagtaggttcaatcaggctaattgtattctctttgggggcctgcataaaatttttcgcaaccttattaattgcttctgcgttagtcgcgatagaaaagagtgactcctcaccattttcatttacttcaaatacaagttataagatgaatagcaaccctgatgtatttattgtcatcatacgacttatccggatcccaatattcattcatcggactattttcattaaatccatccgcttcctgtgtcagtcggtagataataggatttgactgttttctttttacagccatggtataaattcatccggcatcagacttctcatgaagccctcgctgtccgtacggacaagcagtccctcttctgccatctcttccgctatagaagcaacgaacttatatgctacccatgatacatcagccgtcaactcagataagcgacggattgaaaaaatttgtgacagttcattacatgttgtaaagaaaggcttgaacttacgttcgtctcctgtcataaaggcttcaaaaaccctttttcttgcgatatcctttttctctctcagcttcacctcgtattcaaggtctggaatatccaggatcgtgtcttggatactggcttcagttatttcaaaccgggcagaaagagtatctacaagctctttcacctgatctttaagcatatatccataaatagatacatatcctttaccaatgccattgccggtcacacaaagcgacaatctctgcttttccttccaaatgaaatcaggctgtgtctttctccagttatcctcttctttttttaacaataacaaaagcagacatctcttgcaaaccttcaagctatggcattgttccatgttcattggacatatatcagtatcatttgccctccagcccaatcggaacagcagctcctgaaatataccatatgtttctgatgatttttccgtaggcattatcatcttcattgacagttgcgtgtactcattttcgccatagttcgtggcgttccactctgcgtcaattccgtctggtttaaccaaatacattttactcatatttttttcctccatgttttttatttgattcaataaaaaaaatggatgtttggacgacataaaatatttcttaagagacggatactcattttttacatgaacatatttttttaaaatcgtaacataaaaagagtcacgattttaaaattctaacctttaagcacaggaggaagaaagatgggaaaagcaatattgttgttttcagatgggtattcgatttcagaaatcgcaagaggaacagaagcagaaagtcggaagatcatgacgaacaagtataacgatgctgcagataatgtggaagcattatggcttgaacagtcctattgtgaagagaatgatgccattctttatatgaatggagaagatgttttcatctggaaggttatttgtttttaatttacgtgccccgtgacgcatggttcacaatctttttaccgaaactggcgatggcagcgatcatcgcctgtttctttttataaaaaaattttccagtcaaatatgtttctggaaaataattatgacaattatataaagtatcaacaaatgtgatttgaattctctctcatctattttaagctaatttttcatcatatatgaataaactattgtttttgtattaaaacgtcttatttcgtctctcagaaggaaataaaagaatctgttaataaattatataatggccacaaaaatatcgtgtaatgtctgaataagtgtttttcaaataatccttagcggcaatagtcttaaaaaaataaaaatgtatagaagtatgtatttatacatgcccttaaaatagcatttttcgtctaaaactcgtaaaaagttgtcatttgagagttaaaagttataaaaaaggggaattttctgctaaaaaatagctcaaattttctgaccccaattttgaccccaaatgtatcagtctgaaacagtctgaaacaggccaaaacagtctgagacgcaaaaacaaaaaaaagaaagcccagtaaaatcaacatttacaaggcttttctcgaatagcgagagggggattcgaaccctcgacactgcgggtatgaaccgcatgctctagccaactgagctatctcgccgtaatggaacctatagggctcgaacctatgaccctctgcttgtaaggcagatgctctcccagctgagctaagattccattctgttcaattcatcattcgacatctcacataatacattaaaaactgcattatgtcaatccctaaaaggataaaaagtcgagtagcgagagggggattcgaaccctcgacactgcgggtatgaaccgcatgctctagccaactgagctatctcgccgcaatggaacctatagggctcgaacctatgaccctctgcttgtaaggcagatgctctcccagctgagctaagattccattctttgtccgtgtcaggccgacctgacaaaaactatattacatcaaattgttttaattgtcaacaatttttttaataattttaaaaatttttaaaaagaaattttttttgcaggtaaaccttgacaaatcgcttgatttgatgcataataaacaagtcggcggcgtgtggctcagcttggtagagcgctacgttcgggacgtagaggtcgcaggttcgaatcctgtcacgccgactccttggcaggggcaaggccggaagctttctgagtttccggtcttttctttttattcctgtttatccttgcgaatgatcggcatgaaccggctatatggataatacccagtcccacaaaagaaatgcaaacagaaaaagtacttctattttctaaaatccatgtatagaaaaatagaagtacttttttgtaggattgttttatttacaggatgtcctgcatacttttcaagccgatcatcaatgtagatgtgttatgtaataaggcagatgttgccggctgcagaatacctgcaacaccaagtacgatcagtcctgtattaaatccgacgatgaatctgtaattcttgtgaatacgtttcatcaggccgtcactgatcagtttcagtgtaaccagttcattcagactatcggcaccaactgtgatatctgctatctcacgggcaatctcagcaccgtcgctgatagcaataccgatgtccgctgcagataatgccggtgaatcattaataccatcaccgatcataataaccttacgaccagccttcttctcctcttcaacaaaggacgccttgtcttcgggaagaacctctgaataatattcatcaacaccaactcttgctgcaatggccttggctgtacggtcactgtcaccggtcatcataacaaccttgctgatgccggtttctttcagttttctgacaacagcagccgcctcttcacgcagtggatcttcaatgcagataactgcagccaattcgtgatcaatggccataaacagatgtgagcattctgaaggcagtttatcaaattcctccatcataccatccggcacggcacatttctcatcttcaaatacgaaatgataactgccgataacaactttcttgtcgttgatcttggaagaaataccgtgggcaacaatgtattcaacctttgaatgcagctcctcatgcaccagatgtctgtcaatggctgcttgtacaactgctttggccatggagtgcgggaagtgttcttccaggcaggctgcaatacgaaggagttcgttttcgctcataccgttaaaagcaaccacctgtttcacagtcggctgagccttcgtaagggtacctgtcttatcaaatacaatggtatcggcttctgccatagcttcgagatatcttccacctttgacagtcacatgatagttgctggcttcgcgaatcgccgaaagaacagagattggcatagccagtttcaacgcacatgagaaatcaaccatcagcacagaaatcgcctttgtcatatttcttgtcaacagataggtaatgcctgttcccaacaacgtatacggtacaagtctgtctgcaagatgttctgctttactctcaagtccggatttcagcttctctgactcctcgatcatcgtaacaatcttgtcaaacttactggaaccgtttgtctctttgacgcgaatggtcagttcaccctcttcgaccactgtgcctgcataaaccgtgctctctatatactttcggacaggttcagactcaccggtaagagaagcctggttcaccatcgcttcaccctctgcaacagtaccatcaaacggaaccatattgcccatatgaacacggacaaggtcaccggtctgaatttccgttgtaggcacaagcatctcctggccgtcattgcacagccatactcgactgatattcagcgacatgcttctggccagatcatccacagatttcttatgggtccattcttcaagaatctcaccaataccaagcaggaacataacagaaccggctgtactgatatcacctctgaacatggaaacaccgatggctgtcgcatcaagaacaggtacctcgatcttacgctgaagtagtgtatgaataccctgataaatatacttcacagactttacaccggtgatcactgttcggattggcatcggcaaaaacaatttgttgccatagtgaacaactacttttgttacaagtttatcccagtactcgcgattggtctctcttccggaattctgtctgtaaacatccggaacatccactttctcataatgaaagcttcttaacagagcgataactgccgatttctcacctgtatagcagattgtcgcatcctgtgtacgctcctggactttggatgatgtgatcatttcctgggaatccagataatattgtaaagtatccgcttcttcaaaagtcattcttttctgacaaaaatgaacacggatccttccttttatttcatgttttacaacgaatttcatgcgaattatttcgcctcgttttcctcagatgcttcttctgctgtttcttcagcttcttctacatcctcaacatctgtatattcttctgcatcctttgcagctctctcttcattaatctgctgtgcttctgcatagatatcttcagcattttcctggattgttgttgctgtctttaatacacactctttcgcacgtaaaacagcggctgcacagtttgtgtagagtttcttggcatctttgctggaaagcagtttaatacctgctgttccgaataaaagacctgctgcaaaaacacctgtatctttcttgttaatcttcttaaagcattttaacatgatatcatcctcctgattttgtttgtaaccggtaaaacaacgttttctaggtttatcctacattttacatatatttttttgtgttgtccagtaattgataaaatttgtcatattctcaggttacatattgctaatcgctgttcatccggtaaccgacgcccaactcgttggtaatataggtagcctctcccggcttcacgccgaatttcttgcggatattggccatatttacctgaagctttttaacactgccttcatccggatagccccagactcctttgatgatcgcggaatacgtcatcattttgccacaatgctcggacagtaatgctacaatattatactctgtctgggtcagtttgatttccctgcccttaatgaaaacctgtctggcgtcgtataaaatttccagatcctgtacagaaaaacgaccgcccggaagtttaccggaatctgcactgtgagaacaattgcgcaatgcagaacggattctggccagcagttcagctgcaccaaagggttttgtaacatagtcattggccccgctgtcaagcgctaatactttatcccgttcattggtccttgccgaaagaacaataatcggtgtcagagagttctttctgacttctttaagaaatgtcataccatccatatccggcagaccaagatccagaatgaccagatccggacaataagaaataaacaatgttttggccatggcacatgttccagccgggattacttgatatcctgctgtctcaagcatggtcattaccagtgtactgatattctgttcatcttccacaagaagaattttgtatttattattcactttctgacgtctcctctctgttaagtgaaaatctgaaaacaacaccacctttggcattgttctcagccacgatcacaccatcatgggctttgatgattgtctggcagacagataaccctataccggaattgtgtttttggctgtcagcggaagaagctttatcctcaaataaatggtagctgccgttaaatataccgctgagacgttctttttctataccgcatccgtcgtcactgacttcaaagacaacctgctggcccagtacaaatactttcaaaatcagttccgtcatcccatctgcatgcagaactgcattctcaagcagattaaaaattacctgttcgatcaaaatggcatccattgggatgataataatatcctccggcaagtccagataaacttcctgctgcgggtaacgcttgtgaaatttgaccataacagaatcaatcagttcatcaagaacggtaggggtcttgataatcttgatctttccttcatcaatgcgtgtaatggacagaagattttccaccatgcgcatcagccaatctgaatcttcttggatccccttcaggatctttatccgctgctcctttgtataattttctccgctttccagcaaggtggtactggccccataaatggttgtcaggggtgtccgtatatcatgggataccgctcgcaggagattggcacgcatacgttccttttcactctctgctttgattgcttcatgcgttttgacctgtgttgtcagcatgcctgtcaatacagcaatcgccatcatgacaactgcagaaatcatgttgctctgaaatctgaaatccaggacataaaagggataagtatacgcatagttgacagccagtgttcccacaagcgccgatacaatgccgtaaatatagccatcggttaaaatagatgtcagaaacactgcaaaaataaaaatagcggtaatatgttcattcacacctgttttttgcaaaataatgctgctgccagatgcaaccagaaaaaccgccgccattatcatgatatttttccaaagatgatgtcgtttctttttcatggtaaactccttttaccgctattttatcatattcatattaaagatacagcaaaatccgcttatctgtatcgaattcttcgttttgttcgtccttttggcaggccggcaggattatcctattcattctgattcgcccttttcttcatcatgtatgtgacaattttggagcctataaatccggaaaaaatgccaacaaggatacctcccagaatatccgtcggataatgtacatacagatacattcttgaaaaggcaatcaaaattccaagtactattgcagccttccaaatttttttatctcctgaaaaatatagcgctgccacagcagtaaaagaagctgctgtatgcccggaaggaaatgaatagtccgtcggatgtgaaatcaaaagctgtatggccgtgttcacatcacagggccttgtgcgagccacaagatttttcaagaggccattacatacaatcacatcaatgcaaagcccgactaacatggccagtccatattttctcatttttggtagtataagtaataggattgttaaaaaaatccatataattcccgcatcccccagctttgtgatgcctataaaaaaatgatcgccgactgttgtgtgcaggttttgtatcatatcaagaatcttaatttccattacacatttctcctttatttgtttttctatttattttatgatatacttgctttgattactttactgaaaaggattgaagcatatgctgcgaaaaatattaactttttttcataaggaaactgtcttatctatttctgccattctggcaattttatctatgtttattgtacatccaagcggcaagtatttctcctatattgattttcggacgctcagtcttctgttttgtttaatgtcaattgtcgcaggcctgagtgaaattggattatttgattatcttgccgaaaaaatattgtccagagccaacagcatcaaatctatcatcgtattgcttgttttgttatgttttttcttttcaatgattatcacaaatgatgtcgcattaattacttttgtgccccttgcaatcattattctaaaaaaaatgtcagaaaagcaaaagaattactggattttaagaacggttgttatgcagacaattgccgcaaatctcggcagtatgctgactcccatcggaaatccccaaaatctttatttatatgccagagccaatatgtctgcattagcactcatccgactcatgctgccttattctattgcagccttggtgctgcttcttgtgtggatacagattgctgcgcatagagaacctggctcaaccaccgagaatcatataagtgaattatttagcatacacaaaacaaaagctccgaaccaaacatccctcattggatatctaattttatttttaatttgccttttggttgtagcacgtatcatagattacagaatttcattcatcctggtgattggctatatcttcttcaagaattggcatttatttaaaaaagtagattactctcttctactgacatttaccgctttgttcatttttattggaaatttgaaatgtattccgcagtttaatcattttctgatcagcatcatagatggacatgaaaccttaacagccatcctttccagccagataataagcaacgttcccactgccattcttttatccggatttacaaagaactattctgcactcattatcggaacaaatattggcggacttggaacattaatagcctccatggccagcttaatcagctttaaatatattgctaaggaaaagacgactctacgtggtaaatactttatgatgttcaccattgcaaatattgtctttctgattctgctgctgttatgcattaaccttctataaatctgctgatatccttgtacccaatttgttctcaatattgagtataaacaaaagcccttgcgtattctattaaaatagagtacgcaagggttttattataatacctttaaacgctattcatttctttggttgaagctatatcctacattccagcctgtttagcaacctcagctgcaaaatcgtcttcacgtttttccataccttcacctgtctcgaaacgtacgaaagatttaacagcgataggtgcaccaacttctttagctacagattcaacatatttgccaacggactgtttaccgtcttcagctttaacataaacctgatcaagaaggcagatttcctttaattctttgttgatacgacctgttacgataccatcgataaccttagctggtttctgagattccttaggatcgttcatgatctgagcaagaaggatttctttctcgtgtgcgatatgctctgcacttacttcgttacggtttgtgaactgaggcttaagagctgcaacctgcatacaaacattcttgccgcattcttcaactgcttcagcggctgctgttgtatccatgttaaccagaacgccaatcttaccgcctgcgtggatgtaagaagcgataacaccgttttcgtttgtcactttctcaaatcttctgatgctcagtttctcaccaatcttagcaaccatctgggaaagttcctgttctactgtgaaagaagcatcatcgatccatggttcagccatgaatgcttccattgttgtgttgttggaagccagtacctgtgcagctacacgtgcaacgtatgactggaatacttcattcttagcaacgaagtctgtttcagcattaacttcaacgatagcagcggatttcttgtcatcggaaacaagtgttgctacgataccttctgctgcgattctggatgctttcttagctgctgctgcaagacctttttctctaaggaattctacagctttgtccatatcgccgtctacttcgttcagtgctttcttgcagtccatcatgcctgcgcctgtcatttctcttaattcttttaccattgctgcggtaattgccatgattctattcctccgttattcatataatatataaaaataatatcatttagtctaaaaagctgtctcaaagcttatccggccccgagacagcctgaactatttattcaacgaacaaatcagtctctataattattctgcatcagcttcagctgcttctgcttcagttgtttcagcatctgcaccctgttttgcttcgataacagcatctgccatcttggaaacaatcagtttaactgctctgatagcatcatcgttacctgggataacgtaatccagttcttctgggtcacagtttgtatctgcgataccgatcagtggaataccaaggatgtgtgcttcctgtacacagattctttccttcttaggatctacgatgaagattgcatctgggattctcttcatatccttgataccgccaaggttcttctcaagcttctcccattctttcttcagttcgataacttccttcttaggaagaacttcgaatgtaccgtcttcagacatcttctcgattgctttgagtcttgcgattctgctttcgattgtcttgaagttagtcagcataccgcctaaccatctctggttaacatagtacataccacaacgttctgcttctgctttgattgcatcctgtgcctgtttcttagtaccaacaaaaaggattgtgccgccatctgcaacgatatctttgattgcattgtaagcatcgtcaaccatacctacagacttctgaagatcgatgatatagataccatttctctctgtgtagatataaggagccatcttagggttccatcttcttgtctgatgtccgaaatgaacaccggcttccagtaactgtttcattgaaataacgctcattttaatacctccatggttttgttcttccgcagacgtcctctccgggttcaaccctgtgggcaccattcccgaaatcaatctgcgtgtctttttttaccgaatagcattataacataaaggcctgccaatggcaagccttttcataaaattccttctgattcgtgtaattcttacaattaaatctgttaaacccgatcaactcaagcctataatttctttaattcatcaaaaaccacatcattcaaaaccttaatgtatgtccccttcataccggaagaacgggattcgattactccggcgctttcgaacttacgaagtgcattcacaataacggatcgtgtaatacctacccggtctgcaatcttactggcaacaagaattccttcattaccatccagctcttcaaaaatatgtgtgatagcctctaattctgagaatgacagtgtactgatagctgacttgacgatctgaacctttcttgtctcttctgcattctcctcgttgacggaacgaagcatttcaagaccaacgacggtggtgccatattcgctcaatataatgtcatcaatttcatatggcttatccttgcgataaataaacaatgtacccaaacgctcagctgcaatatctatcggggtaataatagcctgataggtgttgatgtcgtcgctctcaaagccaagtgtcagcaaattgacattctcctttgtagaaaggacacttaataatctctcgttcagcatttcatcaatatgtccgcctacagcatccacaatcagttcatgcagttctgcaatatccggtcgattcttaataccgagtactttgcctttacgactgatcacaagaatgttggattccagtatttcactgagcacttcgcatatgtcgttaaagacaaccatatgtgaattattgttatgcagtaatttatttattttacgtgttttatctaacaattgtacgctcatatcaaatccttctttcttttaagattgcccattattactttctcattctatcatgaaaattccaacataacaaggggaatgttggaaaatttcaaattttattattaattaagaaaattatacctacaattaggatgaaaaacgacataagcacagacgtttccgcaaactgaatgttaaatttaggtaaagacagacaatacactttgtcacattacaaagaaaaaccaaaaaaagaatctgtccataaaatcttttcagacttatcagacagattcttctatcacttaaggactattggtcttcttcctttggattggccatgacaaagccgcaggtttcattcatacatacaagcttattgcctttatgcaaaaggacacttccgcattccggacacttcttatccgacggacgctgccaggtcataaaatcgcattcaggattgcccatacagccataataacggcgacctttcttcgtcttcttaatgacgatatccttgccgcacttcggacagcttacgccgattttctcgaagtacgtcttggtatttctgcattcagggaatcccggacatgccaggaacttaccgtgaggaccatacttgatgaccatcatacgaccgcactgatcgcactggacatctgagacttcatcttcaatcttaacctcttccaactccttttcagccttctgaactgcttcatccagatccggatagaaattacggataacagtcttgtaattcacaacgccttcaccgactttatccagtaaatactccagattggctgtaaagttcacatccacaatacttgggaaggactgtaccatcattcgattaaccacttcacctaattctgtaacatagagattcttgttctcctttgccacatatcttcgagaaataatggttgtaattgttggcgcatacgtacttggtcggccaataccgagttcttccattgtcttaacaagggatgcctctgtgtaatgtgccggcggctgtgtaaaatgctgttttgcatcaaaatccttgaaactcagctgactgtctttattgatctttctggccagcacattgttctcagctttttcatcgtccggtttatatacagacataaaaccttcaaaagcaagtcttgaagttgataccgtaaacaagtatcctgccgcttctatcttgatgttggttgtctcgtagacagcctctttcatgcggctggcaacaaagcgattccaaataagctgatacaaacggaactggtctctgctgagggactccttgaccttgaccggcagctgatcaagatatgtcggacggattgcttcatgggcatcctggatcttcttgccagactctgcggtcttaggtgcagcggcgacatattcctggccataattctcagcaatgaagtttctcgcgttgctgtcagcttcttctgagatacgaatagaatctgttctcaggtatgtgatcagaccaacggttcccagtccctgaatatcgacaccttcatacagctgctgtgcgaggcgcatcgtcttctgcgttgagaaattcagctgcttggaagcctcctgttgtaaagtacttgttgtaaacggaacaggcgcttttcttgttcgctcaccagttttaatgtccacgatctgatacgcggcatccttgagtgcatccatgatcgcatccagttctttctgagaatggatctcaatcttctcctttttcttgccatagaacttggccgtcagcggcttcttttcaccgctgacatttaaaacagcgtccagtgaccagtattccttcggaataaaagcatcaatctcctgttctctgtcacagatcaaacgaagcgcaactgactgaacacgccccgcacttaaaccgcgtttaaccttgctccaaagaagcgggctgatacgataaccgaccattcggtcaagcattctgcgcgcctgctgtgcatccaccagatccatatcgatcttacgaggatgtttaatagccgtcttaaccgcattctttgtgatctcattgaatgtaatacgattggtatgtgcttcatccagcttcaatgccgttgccagatgccatgatattgcttctccttcacggtccgggtcagttgcgagataaatcttatctgccttcttggcttctttacgcaacattgccaatatatcccctttacccctgatcgtgatatattttggttcataatcatcttcaacatcgatacccagtcggctcttcggcaagtctcttacgtgtccgttagaggctacaacatgataatttgaacccaaaaacttattaattgtcttcgccttggccggggattcaacaataactaaatatttagccacagccttttcctccacatctatatacttaacacatattgattttttcctactctgtgtataattcccttcaattccatcctaaccagacagtgaatgatacactgcacatccataccggtcagcgcagcaatctcatccgcacttctgggaactaaacatatgctagcatacactactttttcagaattatcaagcgtaatattattttttttatattccctggccagaatgccgaattcttcaagaatgtccgatggctgcatcaccagcttggcaccggcccgaatcagctggttacatccttcacttaaagcatcatctatcctacccggaacagcaaaaatatccttgcccagatccaaaccatgttcaacggtagtcaaagttccgctcttctgcttggcttctgtgactacaataccctttgccaatgcagcaatcagacgattccttctcgggaaatgatatccctccggttttgtccccggaggaaattcggaaagaatcccgccgtttctgctgatctccatatagagatcaatattctcccgtggataacagacatcaacaccgcatccaagaacagcaaaggtacgtccgccttcttctagcgcgccccaatgagcagcgctgtcactgcccctggccattccactgacaacagtcagaccggaagcagcgataccgcgtgcgagcatcctgctgacctgtcggccgtaactgctacattgtctggctccgatcagtgcgatcatccactcttccggggctggtatgcttccaagaaaatataaaacaatgggcggatcatgaagtgatttcaacatatcaggataatgtgtatccacaatggaaaggcattgaatgcccttttccttcatctgtgcataggcacggcagattctgtccctgtttctactatatataatactctgaagctgtttttcactcacaatatgacgaccggcgattgttttcttatcagcttcatacaatactcgaatatctccgccgaaagcatttaacaacttaagcgctgttacgttcccaataccgggaattgttccaagccagagccagtattcatccttttccatttccgcttccccaatatctcccatccaaacacttatagaacactgcttcacttatatcatctgtcgtaatcctcaaatgtcccgaaagatctgcaatggtccgtgcaaccttcaaaatcttatggtatgtccgcgcactcagatcatactgttcataaatattcttcattaacatccgttcttctgcttcaagcgcacaatatctctccacatccctgtcatgcagctgtgaattatatctataaacggttccgctgtaacgtgcatcctgcatggcccgggcttgttccacccgcttcagaatctgagctgaacgctcttcatctgacgcagcttcctgtaaagactcaattctggccggaagcacctctatattcaaatcgatccgatccatcagtggttggctgattctgccaatataacgtctgatctgtaaaggtgtacaatggcacttccgtacgtcagggataatagccgcatcggcatggattaatcgctgccaccagcataaatcctgctggaaacacacacatcgcctgcaaacgattgatcattatatggccggtctctatgggctgacgcattacttccatggctgcggaactaaattctgttaattcatccaaaaacagtacacccctgtgagccaggctgatctccccaggctttggcaatctgccgcctccagccaatgccacatcagaagccgtatggtgcggacttctgaaaggccgtgtcgtgatcaatccctctgcaggcttcagcaatcctgcagcactgtaaatttcagacacttccagacattcttcccatgtcatcttcggcaaaattgtcggcaggcgtcttgcagccatggactttcctgctccgggaggcccgatcagcatcgtatgatgcatccctgcagcagcaatctcaagtcctcgcttcatcgtgtgctgcccgcaaatgtcactgaaatccagctgtgatatctgcccttctgatcgttcaagcaaagtatccctgtcgatatatgccggctcaataaccagacgtccatccaggaagccaatgagttcctgtaatgtatgtacaccatagacctctatatcatcaacagctgccccttcaaaggcattcattgcaggtacaatacacttggtcatccccatcctcttcgccatcaaaacaacagataaaacaccattaacagggcgcacactgccatccagactcaattcaccgatcaatacggtatgttccagactttccggcataataaagccataagcacacaaaacagccgatgcaatggctagatcacagatcgttcccgacttgcgtacatctgccggtgaaagattcacaatgatacgtctcggttccaatttgaaaccggcattccgaatagctgttctaacacgctccttcgcctccttcacctctgctgataaatagcctaccatctcaaaataaggcagtccgccgctgacatctgcctcaacagtgatcatatcacttctcattcccagcaggactgcactgattgtcttactaaacatttctgcacctttcctgcagcaaatacttcaatcccctgactcacattatatctgacagacaaaaacgtcgcaattatcattcatcgacagttttcacaatatactttgagctttgtcgacaaatgacaggtgatttatcagataaagtctggtataatgtcatcatacattcattttcagtttttactgataggaaaagacatttattggaggtttgtttatgcgagcagttatacagcgcgtatcccgcgcaagtgttgatgttgataatgagaccatcggaagcatagaaagaggctttcttgttcttctcggtgttgctgatgaagatacggaagaagacatggcgtatcttgtgaagaagattactcagatgcgaatatttgaagatgaagcaggcaagatgaatctttctttaaaggatgtcgacggtgagctcctgatcatttcccaattcacactgtttgccagcacgaagaaaggcaaccgtccgagctttacagaagccggtgcacctgatttttccaaggatatgtatctgaagtttattgcagcctgccgtgattgcggcatacatacagaagaaggagaattcggcgctcatatgatggtttcactggtgaacgatggtcctgtgacgattacgatcgacagcaagcagagacattgattcacagcatcactgttatacatatgatgaacccagcgcctttgaatcattatgcataagcagcaggaagacatccttattcgaagatgccttcaatttctattactttttgataaattgcctctgccagcaatcgatgattctcaggatccatatgttcctgatcggctgcactgggctttgcatatgcagccgcattaagaaatgcaatattttctttttctgcaatctgacgataaacttttgccagatgctttgagacagcgacagatttctccgagaactccggatcatatcccggtttccagactttctctcccagccagatgggcgatatgagcagaattttactgtcaggtgcaccccctcgtatttgcccgacaattttttcaataccttttccaatcatttccgctgacgcgccataggctgccttgcagtcattggttcccagcatgacgatgatcagatctgcgtgctgatgtgtttcaagcaaggccggaagcatgtgggagccatttcgattgtcccgcaacggatcctcgaagatggttgtccgtccacacagtccttcctcttcaatatgatatttgccatagcccagcttttcattcaacaagctggtccatcgtacaccccagggatatctctccccgttttcgggaatatacccatatgtattagaatctccaaaacacacaatctgcttcatatctatctcacctcttgcctttatcactaaatcgtacgtgtctgcttgaatatacattaatcatactatccagatatgatatagtcaaatagatattttttataacctgctatcattaaaagcgggccctgaatttcaagacccgctttaaatgtgtgatcacattgaactgtactaaatttccatctccattaaggccatgcctaatgctttaccatgtttatcaatggccagtgaacgtgtaacaccaccgccaagtgtcttatcaagcacaaaattcatagcgcagatgctgtcaatatcatagcgaacaacttcacctttgcagatttcaccaaaatatgcttttacaacttccggtgttaccttttctttcagcatttcataatcttcttttttgtatgggattaatgaaatgtttgaaatatcacctttatcacctgttcttgaatgtgcaatttcttttaatttcataataattaaacctccttatagcctacttcaatcttgataatatctctaggtacaaatattgaacaaattgatacgatttccgaaactttctttgttgcgccggcaccgcctgctggaccgtttgtataaagtgcttctacttcatttgcgattaatgttgcatttgctttatcttttgttctgccgctgacacggagtctgatttcagggaatacatccggtgcatactggtcagagatttctgatttataaagagaattataaccgatatagtcaatacggaactcttccatttcaacaccaaccagtttcagacgcttttctacaatatccgcagccagctttgcacgattcatacagttcataccaccgtagctgatctcgccttcaccaataaagcagtctttataaccaacactgacttttaatgtctcaggtttgccatgggaagttgcatgggcagcttcaactctgtctttgcctacctgtgtaaatgtgacatgtgaaaagtctgcaactgtatccggtgtcagatatctctcagggttatgaatttcatagatcatctgctctttgcatgtatcctcacataccagaccgccggatccttcaacctttgtcacaacaaatttacctgtttcatcgatttcaataagcgggaatcccagtctgtcaagatcaggtacatctttataaccaggatctgcataatagccgccggttacctgacctgcacactccagaaggtgaccgactaatgtagcctgtcccatcttatctgcatcatctttaatattccagccgaattcatgtacaagaggtccaattgataaggccgggtcagatacacgaccggtgataacgatatcagcaccattttcaagggcttcaataataccttctgcaccaagataaacattggtagaaagaatagattctttgatatcccccagtttgcaatccaattcaaggacatcattatcataatatttttcaatctgaggtgtaatatcatcacctgttacataagcgatttttaatccgctgacgcccagttcttttgcaatttcagctgtcttttcagcagcagctaccggattggctgcacccatgtttgtgataactttgatatgattatcttttgcgagcttaaggatctttctcattcttgcttcaagaagctgattgtagccttttgtcgggtctttcatcttatcctgctggccaatggcaattgttctttcagccaggcattcaaagataatataatccagatttcctttttccattaattctactgcaggttcaatacggtctcctgcataacctgcgccacttccgattctgatttttttcataataaggtcactcctttttattctgtcataactttgcttaaaacaagtactttaaatactttacgttatcattaaattgaaattgaaccaacgattactgctacaatcagcatgacgattgttgtcataaatgcaaatggaatcgtatgtttctgatgttcaccaagatcaatgcctgaaagacctgtcagcaggaatgttgcaccagtcaatgggcttacagggaaacctgttgtcatctgaccgataatagatgctcgtgcaatcatgattggattcacacccatctgttcaacagcagatgcaagaaccggcataacaccatagtagtaggaatccggatcaaacaacagactggctggcattgaaatgatacctacaagtaccggcatcaactgtccaactgaagcaggaataatcttgacaatcgcttctgccattgctgtcaacatacctgaattctgcataataccgataaaagaaccggctgcaaaaagcatacttgccatcattaaagcagattttgcatgcgcgtccacgcgttcagactgcatttttttatcaggataattgacaagcaatgcaatcgctgttgcaatcataaataccgctgccggaggcagaatagatttgatcaatacgacaaccgcaataataatcaaagcaatattaaagatgaaaagatgcggacgctttaattcatcagcttctgtcgcttcatgatgtgaatcatccagttgaaccgcatcaagagcagcgcccagacgctttttctcagatttgccaagaaatactgcgacaccaagtacaaatgcaaggccacaaatcataggaataaccatcggagtaaataattcctcgatgttggatgacattgctgtaatggcacgaattgtcgggccgccccaaggcagcatattcataacaccggctcccagtgcaaccagtgttgccaatgttgtttttctcattcccagtttctcataaagcggcagcatggccggaatggcaatcaggaatgttactgcgccggaaccatccaaatgaacgagacaagctaaaatgactgtaccaatgcagatcttgacaggatcttttccgactacctgaagaatttttttgatgattggatcaaaggttcctgcatctgtaaggattccaaagaataaaattgcaaaaataaacataacacctgttggagcaatgctctttaaaccggctgtaataaattcgcccatggtcttgacggtaaacacaccttcctcaagaacaatattgccggtaaatcctgcaacaaggcatccaatgatcggtacaatgatcaatgccagtaatgtttgtaacttttttgtcataatgagtacaagcatgatgacaatggtaagtacgccaatgagtgctaacatgaaattttcctcccataaattcattttttctttgttgtttaagcagttggccatttgctttttcttacaccttaatatatagcaagatgcgtgccaactttattttgcactatttaggccattttacgttatttttctatcaaaaaattccagatatttggaatttagcacgaaataattctaaatatctggaattttcaacaatcaagtttcactttttcctattttattataaagagaagacagggaaattcccaatgccttcgccgctttcttctttccatccgttgtccgcccgtatatatccagtgtatgcataatctcattcttctcaaattcacgaattctctgatcaagaggaatgatatcctcttcctgcataacttgctgtccctgcaaaaggctcggcggcaggcaatccagcgtaatctctgtgcccagtgccataagtgcacaatactctacggtatttcttaattcacggacattgcccggccaatcatagcaatacattctttcttttacttcatccgtaaatgtataattttgtttgttctgaatctgtgcaatgtgaagataatgttccattaacggcagaatatcttctcttcgctctctcaaaggcggaattgtcaatggaaaaacagcaattcgataaaataaatccattcggaacttcttttcttctatgtactgctgcaaattgacattgcaggcactgatcagtcggatgtcagtgtcaatttcctggagtccgccgattcgtctgaatttcttttcctgcagcacacgcagcagctttgcctgtagatcataatccatttctgatatttcgtcaagaaaaagcgtcccgccctttgccgtttcaaaaagtccaggcttgccgccttttctggctccggtaaatgcaccattttcatagccaaacaattcactctcaagcatcgtcttattaagcgccgcacagttgatggccacaaatggcgcatcccggcgatcactttcattgtgaatagattgagcaaatagttccttaccacatccactttccccctgaagtaaaatattaacagggtgtctggccacttttttggcttttgcaatagtttctaatgttttgggactgctgcaaataatttgttcaaaactatagtgcgtaccgtttgttctgcttaaacggtccttcatgactttctcctgttcttccaatttaagcatcttgtccttaatacagttagcattcatcatcgatgtaacaacggatacactgccgacaacctgtccatcttccatgaccggatagacatctgcgaaatactcctgatcattttcaactctaaacaatgattcctggggttttccattcgcaataacatccggcacaacagctccgggacgaatatctcgaattggcttaccgcatatttcttccagacgataacctataaaacgactatagctgctgttaaaatataaaattctggatttttcatcgcacaatagaaccccctgattcatagcctcatatatatccttttctctcatccttatccccttttctcatccaatatttgtaactgttcagagccaagcaaaatttcaaaaaagaggttggctctgaacagttaccagtattttatttctggagtctgcctgaaaccaaagcccatttgaaatacagcattcattcaggccctcagatatgtccgcatattctgaagtgctgatttttctattcttgaaatctgagcctgcgaaatggccagttcatccgctacttccatctgggtctttccttcataaaaacgcattttgataatcctgttctcccgatgactgagtcttttcattgcatcattcagcgccagattctcaacccagctgttttcaccatttttcctgtcgctgacctgatccataatacacaacgcatccccaccatcggtataaaccggttcatataaagacatcgggctctgaatggcatccagggcaaagacaatgtcttccttcggaatacccgtttcctcagctatttccattactgtcggttcacgattatttcttgtaatcaaagcctctctggcgtatatcgccttataagccgtatctcttaaagagcgactgactcgtatagcactgttatcccgcagaaaacgacgaatttctccaacgatcataggtacagcataagtgctgaaacgtacaccttgtgttaaatcgaagttgtcgattgcttttataaggccgatacagcccacctgaaaaagatcattgacattttcattggtacccgagaaacgctgtataacactgagaaccagcctgagattaccattgataaaacgctctctggcccgcagatcatggctcttgatcctcttcatcaacatttccttctcgtcttctttcaggagcggcagttttgccgtattgacaccgcaaatctccactttgtatccagccatacaaatacctccgcatcattagattgagaattcatcccaaacataatgatgcgcatgatgaggtcattttatgcaatgctgtatcaggaaatatctgccgccttctcaaaaggaattgtgccgccaaaaatatccaacgcactgccaattgtcacatccagacgacggttgccaagtttttttaataattcaacatcatcaagagatccgacaccgccggcataagtaatcggaatgccatcccagacgccaagcattgatgcaagttcttcctctattccggaggctttgccttccacatccactgcatgaatcaggaattcactgcagtaaggcgccagaagattcagtgtctcttcgttcacaacatgttccgtaaacttttgccaacgatctgtgacaatataataaagtccatcctttttgcggcagctcagatccagaaccaaatgttctctgccaacagattcatggattgcttttaaatgttcaaaatcaatctttccttccttaaacacataagaagtaacaataacatgtgaagcgccggcgcgaataaacttcatcgcgttatcactatgaatgccaccgccgatcatcagaccgcccggaaaagcctcaagagctcccatagcctgaacaaggtctgcatcatagtactcagagccttcgggatttaaaaggataatatgaccgccaatcagtcctttctccctgtataacctggcataccaggctgcatcctgttctgaaacaaaattgtcaatggcctggttcatttcatcctttaaactgccgcctacaatctgtttcacctttccattatgtatatcaatacacggtctgaatttcattgttccgcctccatttacacttttggccttattatatccaaaataaaataattcttcaagccgcatcatatattttagagatagcattatcggagaattgctttatgcgtatctgtgaactccgcgaaaaagaagttattaacatccgggactgtcagcgtttgggtcgtgttctggatattgaatttgatcttcatacaggcgtcatctgtcagctgatccttccggggccctcccgtttctgcggtttcttcggccgagatgccgaatatctgatcggttggaaatgcatccgccaaattggtgcagatatcattcttgtggacgttgatctcgaaaaatgtatgcaaaaaccgacgaattaaattgacctgtgattcacaattgtttataataaacggtagcagggagttttcccttttgtacaggaggaagaatatatgaagtgcccattttgcagtgcagaagatactcgtgttattgactcacgtccgactgacgacaatgcttctattcgacgtcgccgccaatgtccggtttgcggcaaacgttttacaacttacgagaaaatcgagacactaccattaatcgtcatcaagaaagacaacaatcgtgaaccctatgaccgctccaaaatcgaagccggcatcgttcgttcctgtcataaacgcccgatttcaaccgctcagattacagcaattgtggatgatattgaaacggctctttacaacagagaggaccgtgaaattccgacaatggtcatcggagagcttgtcatggatcacctgaaggatctggatcctgtagcctatgttcgatttgcatccgtttaccgtgaatttaaagatatcgatacatttatggatgagattaaaagccttctctcatctaactaaacgagatgaaacacattttgcgagtttcactcgttatcgcaacagtcgccaaggtcttgtgccagcacagactttttctcgttgttagcgtaaatcaaaaaggaagctattccatcatccattccgtttgataacagaatggggttagaatagcttcctttttttatttcttttttatctccctttgaattctgcagcatatctgcacacactgttcataggtttcctccgacagcatatcttcaccgaaagctgcctgatagagtttttccatgagaaaagtcaattcctccggctttaccgtctggactctggactgaagccatttaatataagcccagtcatccatttccttatctgttcgaatacctgactgatccagctcatccgtcaagtgtgcccacattgcaagcaatgctttattacgattgacacggctgtaatgccggggctgattctgtctgcgcctgtaaacatacacacccaaaccggcaataacaatcatcgaagccatgccgagcactatttttactgcggcagaaatgccctgatttgtcctggaaatatcggtatttacaccggtctttgtctcctctgtacgatcattatcattacgactctctgaaacaatttctgtactttcagtatgatttccagtatcaccggtatccgagattgtctcagtactgtctgtataatgattgctgacattatcggtactttctgaatggccgctgttttcctgagttggcagataattggatgtctgcacgctgtccactggggtcatatccaccggcacccatataccctgtgacgcattataaacttccacccaggcatgtcctctgtatccggtcacatctgccatataaccatctgaagcactgtctgctttgaaatcatccggccagatgacataccctgtcacatatctggcaggaatacccgccattcgaagcatcatcacccctgcagatgcaaaatgcgtgcaataaccttttctctgtctgccaaagaaatcctcaatcacattactgccatcaggtacagattcaaggttatctttttgataggtgcaggtttcccataaaatattctgtatctgagcaacccactgggatagcgataaatccccattctcgtcctgcatgacctgcactgcggcttctaaggaaggcagtccatccggcacattcagataattggcttgtacataccggttgtagatatcgaacaacgccgctccatcacctgcaaaaatacccgatacgtctgcatttgacaataaaacatcgttatctgtcaacggatacccctgaaattctctgtttgatgatgatttaagataactgtcaccttccatttctatcccatctgtatcaatgccatagggcgcccatgtgcacattttgcctgcggacacattggagataatataattaacagtacccgtttcatcagataatctatccagacaatcatacagctgtttcgcccacagcgcctttgcttcatcatagttcagactgtcagataccgtccaattctgatattcattctgtaagctgttatctgtaatcacattccactgttctgtctgtgtattaaagccatcaccgacaaaccccttcagatatatggctgcttccggctttttatccgtccatattttcagctttgttctgccggactgtaccggagaatgattcgacacctgccactccctgtcacccagaaagactgataaaacctgctccgaagctgccatcattgtctgaggatatttcttcaccgcttcataatggctgcgcatatattccgctgcaaaagtatcggcaatataataactcgatccaaatataactgccatcagcaccaaagcaaagagaccgtttttcatggcttttgcattgaatatccggcttcgtcccgaaacactcgctgataaaaaggccgtcagtcctccacaaaatactgttgtcatcaccatcatccgaatatccggaaaacgattcagcagtagcgacattgcaagcaccagaccggtaaaaaacaacggcagacgttttaaacgccatatgctgactgcatatcccactgccagcactaatattcccagtacaagcacataaaaaaacatactctctgcggcctcggttttccctgcggacaactgcagatcaatctgataataattgcggacagcatctgaaaagtcgttcagccatgcattcagcccggagactgcctttgtacgattagtatatatggagactgccaatatacccatcgcagccggacatgcgatgcttaatttttgaagtatctggataatttcaaatatcaggcagaaaatcagcgccgcagccaataacattagaaaatcaggggatagtcccacattttcacatacccagcaaagccatccggcagaccagaatccaagcattattccctgcatggccgctgccgcaatcaacgtcttatgtttatttttcatcttttttccttttatttatcactataatccattgatcaaacacggagcatgcatttttccatggatgtctccatatctttttcatcaaaatgccctaccggttcatctgccgtaaggatatccccggataatctgagggtaatatctgccgcatacaaaccatacggaaacgcttctttatacattactttcagatccatattctcatcatagcaggctgctgacatcagatagcctgtcacctcataaatgtcctctattttgctgatacgctgtttacaaagatgtctgccttccaaatcataccagacaataaaatgccggcaattctgttccagtaaagcattcgaaacagacaatgctgcctcaatcaaagccgccatatgctgcttttctgctttagatgcagcataaaaatctataaaaatgcctactgcaaggcagataggttcaccggcttccctcacatagagttcatcatttcgcgctgtcaatttccagtgaaccgtctgaagtctgtcccccggacgataaggacgaatttgataagtctgcgaagcatcatgaccggcagcctccggttcgtcctcctcagtctctcctgcaaagtgccgtactccctccgaaattgcagctgctgtatcataaatctgcggtaaaatagttatctctccagtcaaattgacttttttcgtcagacagaataaatgaaaaatatcccaaatctgaatcctgcctgcaaacacatgcatcttaccgcagttgtcaccgaaaatctgacatactgtagtcaccgccgtcccctgttttcggccgttgtcaaaacttacggcatacttctctttctttcctgtaaaatgggataagcaaataatttccgcatgaatactcccgattaaaaacggcagtctgttctccaatctgaaaagaagttgaacacctttattcttctctgccgccggaacagggattttcatggagactttcaacatctgtcgctgtatcaacaacaacagcaataacagtacaaaaagtagcaatgccgccacaaaaaacatggtcactgcagcatcctcaaaaacaacagactcataagccgcaaatatcagcagtccgagataaatcatccatcgtatcatcatacattctttctccggacggtaggccgttctgtttcattgataatctgttcgatcaatccctctgccgttacatggttaattcttgctttggcattcagccggatacgatgaatcgccacatcataaaaaatatccgccacatcatccggatagacaaattttcttcctcgaagccaggcacagcttttggccatagccgccagcgccactgttcctctcgggcttatgcccagctcgatcatgtcgttatttctcgtcctattcactagccgcaccatatatttataaatggcattatgcacatagatctgctccgcctcacggcgcgcttccaaaagagatgccgcatccatgactttcatcacatcatttaacgggtctcctgcagatttgcccttcagaatagcaatctcatcttcaggattcggatatcccatggtcagacaaatcataaagcggtccacctgggattctggcagcatctgcgtaccggcgctccccaccggattctgggtggccagtacaataaaaggattcggtaccggtttggtgatgccatccaccgtcacactgccctcttccatgacttccagaagcgccgattgggttttcggcgatgtacggttaatttcgtccgcaagaaataaattgcacataacggctcccggttgatagacaaattttccgctgcttttctcatacatggaaaatcctacaatatctgccggaagaatatccggtgtaaactgaacacgattctgctttaaatccatggcctttgaaaaagccagtgccatggtggtctttccaactccaggtatatcatccagtaaaatatgcccgccggcaatcatcgccgccataactttcaaaatgcaggtgtcttttccgataaccgcctttttaacttccgccattacagcatttgccttttgtaaatttacagactgcatccgtattttctccatatttcctccatattgattggccttttttatcattttacatgatttattctgtcaattcaatcctttcaacactttagatgcattttagatgcagccgtcaaaacgtcctgcagctacaatcctttttctgacctcaggctccttccatacggacaatatcttttttcaggcgtccgataatctttttctccagccttgagatataggattgggaaatgccgagaaaatctgctacttccttctgggttttttcttcaccgtcagccgttcgtatgccaaatcgaagctgaatgattgtcttttctctcggcgacagctttgccagagctttatacagcagatgataattaacttcctcctccattttattgtagatcacattttcatccgtccccagaatatcagacaaaagtaattcattgccgtcccagtctacattcagcggttcatcaatggatacctccattttcagtttactgctgcgccgcagatacatcaaaatctcattttcaatacatcttgacgcataagtggccagcttaatatttttatcgggattataagaattaatggctttgatcagcccgatggttccaatagaaatcaaatcttccattcctgcaccggtattatcaaattttcttgcaatatagacaaccagtcgcagattatgttcaatcagaatattacgtccgtgctctctttctgcctccgttgccaacatagcaatggcatttttctcctcctcgccctctaacggcacaggaagtacatccgtcccgctgatataatgaatttctccgtttgatttataaataatgcttctgaatccccgcaccatacgatatcccgcataattgattgtccgcatcacgtcattacctcctgatttatgatgattttacctatctgatgcgctcagaccatattcggatgcaagatgatctcatagccatccgttttaccaaaaggctgctttgctacagccagtaccggatacgacgtttgaaaaaaataccggccctcgaatacaatcaattcatccgcgacaaatcccctcagcaggccgttttcaacaccaatactgctgtatggaatcaatcgaaaccgtgtgtcccactccatttctccctcaaaaagacgtgcagccagttctttcccaataatgctgaccggctttcttctgataggttcgtacaaacagttccccgtatcataaagcccgatggtttctattgtttttagtcccaatttgatttgtacacggtaaagagtcttccgcttatgacggcaaagtagcctgcatcgttgacgcagtttccctgccaagtgatgattcatgaaatgcgtataatggaattgcaggaaatcattgtacctatatatttcatcccaggtggcagtccggtttaaaatatttctttcctcctgatttttggtacggatttattatagcgtatgtcccataaataatttgtcaaaacagggccgtatcatctgaaatatttcgactaaaactgccggattcatcatgccaaagttttgtgatgaaaaaaagaatgataatattgaagacaaaaaggcacaccctgacggatgtgccttaaaattcaaatattcaattcattatttcttctgtaagaagctaggaatctgaatgttgcctgttgtacctgcaggtttcttcgcagactgattctgctgaacgaatgaaggtggtacaggacttcctgtcggcgctttgtatgtattgctgccaacgcttgtctggtaaagcggtttctttgcataaccaggtttctgtggtgtctccactttcttctcttcttcaagacctgttgcaataacagtaattgttgctgaatccgggttagaatcatcatacattgcaccgaagataatattcgcagattcacctgccagctcttcaacatacatagctgcttcattggcttcaataagaccgatatcaccggaaatattgataatgatatctgttgcgccttcaatcgttgtctcaagcagagggctcgtgattgcctgcttaacagcttcaagtgctttatcatcaccatgaccttcaccaataccgatatgtgcaattcccttgtctttcataacagttgaaatatctgcaaagtcaaggttgatcagaccaggaacattgatcagatcagtgataccctgaacgccctgctgtaatacttcatctgccttcttcagcgcttcaggcatagatgttcttctgtcaacaatctcaagcagcttgtcattcgggataacgatcagtgtatcaacattctgtttcagtctttcaataccctggatcgcattgttcatacgctgtcttgcctcaaatctgaatggctttgtaacaacaccgactgtcagacatccgagatctttggcaatgccggcaacaacaggtgctgcacctgtacctgtaccgccgcccataccacaggtaacgaataccatatcagcgcctttgatcagctctgtaagctcgtccatactctcttctgccgcctttgcacctacttcaggctttgctccggcaccaagaccttttgtcagtttctcgccaatctgtactaactgtggtgccttacataactgcagtgcctgacggtctgtattaacaccgatgaattcaacaccgagaatattttcatctaccattcggttgacagcattgttacctgcaccgccaacaccaattacaagaatttttgctgctgcttcattttcatttggttttatctcaagcaaggttcttcctccttcatattttaccttttatcgtaccataccattatataatattatttttttttaaaaatatcaacctttatttatgaatcttttgtaaaaataattgaatcttttgtcgaatcgtactcctcaagatgcagtgtcccggacagaccttccagtttcgaaagcaaatcattcagttcagaaatcttttcttccatatatatatctttgccgagaagaaccttaaccttgcccatgacaatataatagccgccgtcatctgacttgccaagactatctgcagtaatcgcttcgcttcgaagaatagctgcaatatccaaaaaatctgcaaagacaccggtatcatcagacaccagttgttcacctacttctgctgtatcagctgttataccgcttaaaagaaggacatcctgaagcttctctgtctgtttcaaaacaattttgccgctgtcattgacgtaaatgtattcatcttctgactgaacatatcccgacagtttttcttcattcacctgtacaacaattgtctgtggatttctgagctgtacatgaatgctgttcaacaatggctcagaggatatatccgttttgcggttaagcagccacaacagcaatgaattgttctgacatttatcatattggatcaatgtctggatcgtctcatcactgacacgctcattccctgtaatccggatagtcttaatcctgcagccaaacaccaccgccagaataaggccgacagtaacaatcagaaccagccaccccttcatgcttttcttctttttcttttgtttgccgggacgcttccttctctgactttcttgcatctctctgtctgtatctgtcaatcaattatcctcccatcttcgttctgtatgatcagttatacagcaaatctcagcgcctaattgcccaagatccctgcatatatcctgatagccgcgttcaatatgctcacttccgtgaatcaccgtctctccctctgccgcaagacctgcgatgacaagtgccgccccgccccgcagttctttcgcctccaccgtttcaccatgcatccggcaagggccatgaatcactgctcttcgctgatcaacggtaatattaccgcccattcttatcagttccggaacgactttgtatcgattctcaaatatatgctccgtcacggtgctgtcccctctggcctgacacagacatgccagcatctgagactgcatatccgtcggaaatcccggataaggttctgtttcaatttctttaacagccaagagcatagacggtgctattattttaatactttctttgtaaataatcaagccacatcctgattctaccagcacatctgcaacagcacgcacattttcaatatgaattccctttaaaacaatctctccgccaacagcggcggcagcagccatgtaggtacccgcagcaattcgatcagccatgatcgtgtactctgtatcatgaagtgtttttacccctttgatccgtatcctctctgtgccttctccttctatgcacgcaccggattttttcagaaaacggcacagatctgcaatttcaggttccatagcggcatggataatttcagtgacaccgtctgcaagtacagcagccagcaaaatattttctgtcacccctacactgggataaggcagttcaatcctgtttcccttcaatcctgtcgttttgcattcaattttattttccttcagattgatctgtacattcatctttcgaagtgcatcaatatgccaatctataggcctggcccctatggtacagccgccgggataaggcattgtaacttcctgtcctcttcccagcagcgctcccaaaaggatgatcgatgagcgcatttttccggcatccagagaagaaacggcaactgtatccatctgatctgtttttacccagacgtctccgtcatcccacataatccgggcacccgactgctgaagaatacgcagcatatgatgcacatccattatctgtgggcagcggcgaagacgaaccattccgttattcaaaacagaggcagcaatgatgggcagcgcagcatttttggcgccctgaacttcaatctcgccatgtagactgtgtccgccgcggatctttatatgtgacatatctcgcctccacgattacaggtttgtgacttcccgtcataatttatgatatgtatgtttttccctgttgtgcaatgttttgtacaattccgatttcacacatcaaaaatatcagcgacgttccgccgtaactgataaacggcagtgggatcccggtatttggaatactgtttgtcacgacagcaatattgatcagcatctgaagccccagatgtgctgttacccccatcgtcagcagtgcccccggtatatccggtgcagaattagccgtaatcagacaccgccaaatcagaaaaataaacagtgctgcaataattcctgcaccaagaagtccccattcctcgcatataacagaaaaaatcatatcattatgtgcctccggtatatacgccagtttttgaatacttttcccatagccccggccaaaaaggccgcctgaaccaatggcatacaaagactgtcttgtctgataaccttttggatgcgtttcaacattcagccatgcctcgatccttcctacccggtatgaggcaagcttcaaaaatatccccatgaatccaccacctaatcccataagcacaaaaaacggcagccattgcctgctggctgtaaaaatgataatgaaggcaattcccataatgataattcccgtgctgagatttgtcaccatgaccattcccgctaccggcatcatccataaaaacacgagcagtatgcccttccattttttcatcatgttgccggcggctccgcagatggatgccaggaaaataatcagtacaaatttagcaaattccgacggctgaaaaccaatagaaccaatataaatccagcgtttttggccatggctggctgtccccacaacaaaaaccgccgccagcagcaaaagcgaaagaccatacagcggcagagccattttaagcaatcggtgataatccagtttcatcatcagaaacatcgctgctgtcccgagaagtacggtaaaaatctgtcgttccacataataaaaagcattccccatatgcagccgggcagtataattgctggcactgtaaatcatcagcagcccaaacagaataagcccgaacaccgtgccgagcatcgcccagtcgcccacaaatctttttctattcattgccgtcacccgaatcactttctatgtccggccattgccccaggtaataaggcagaacattctcaaaaatctctctcatgaccggcgccgcaacggttcctccataataggcaccggtcggctcgtcaatcagaacgatgcctatgatctcagggttatccgccggggcaaagccgataaaggaggcaatatatttgccggatcccctgggcaatttctggctggttgccgttttgccgccaatccgatatccctcaatgaagcattttttgcctgtaccttccgaaataaccttttcaagcaatgccttcattgtatcggagacttcggaaccaatgacatgtgcttcttcattatagtgcagtcggatcatattgcctttggcatccacgatccgaacccccaaatgcggtgtgatcagtttgccgccattaatgacagcactgactgcccgcagcatttgaataggtgtaatctgaaaagactgtccaaaagaaatcgtcgcaagttccacatcccccacattgtcaatctgatgcatgatcgaacttgcctctcccgggagatcaatgccgctcttttccataagtccaagcctgtcaaaatattggtacattacctgaacgccagttctaagaccggtttcgataaaaacaggattgcacgaattcatcagtccttccacaaaggattcagagccatgtccgctgatcttgtgacatcgtatccgccggtcatcgacaatcttatatcccgggcagtaaaaacggtcattttgtgaaaccacgtgggattccagcgcagctgtagaggtaatgatcttgaaggtggatccgggttcataggtatcgttcaggcagccatttcgccacatctggttcaacgcatcctgtatagcgtctgtttcggcattttcaggcaataaataaggcgcattcagattgaattccggttcattggtcatggccaaaatttctccgtttttcggattcattaagataacagagacggattttgcttccttctgttccatgattctttttgcaacctgctggacatagctctggatcgtataatccagactgatataaagatcacttccgggaatcggttccacccgcccctcggatgtattttcgacttcaatgcctcttgcatccgtcgttgtcagaatcgtcccctctattccctgcaaataggcatcatattgaacttctaacccaataatgccctgattgtcgccgcccgtaaaacccaacactttggaggccagcgttttgtatgggtaataacgggtataatcttcatccaccataaccccatccagtttgtattcacggattttgtcccccagcgctttgtcaacattagccttaatacgttcaatagatgacactttttcgacccgtgcccgtacttttgcttcatccagagacaagacctctgataaaacacggataaccttttcaggttctttgatctgattgtgtatcacagaaattgtacagacagatttgttgtccgccaaaaccctttggtttctgtcataaatcagcccccgtgccgccttgatgcttcgctccctttcatgcagtgcatcggcctggctctgatagtacgccgaccgaaatatcatcagataagccagccgtcccatcaaaaccaggccgatacccacaataaaagtggccactatgagcatctttcgtctatgatagattttaatatgcatacatacgtccgctttattttttattatattatgttgtcgttattcctattagaacagctgttattcatcatcatctgatgtgccgttatccgaattgtccgcaccttcatcgaactgatcatcatcagaaccgtctgaggtgttctcattggttgtctctgtcacttcttccgtcgggaagatctgcagatatggtaatgcctcagagaatatattacttgcaattgtggaggcaaaagagctctgcccctgatcctctgcattggcctcatcgacaaccacatagacaaccagctgcggatcatcaatcggtgctgcgccaacaaaggacacaagacgttctttgccgcctcgaggaagcttctcagctgtacctgtcttgccgccaatcttgtatccggctacctgcgctgccttacctgtaccatcctctaccgtctcatacagagcattcttcatccattcggaggttgtctttgaaacagttgtccgcatcagtgtcttatcaaaaacctgcaccgtattgccattatccgatgcaatctcagatactacatgcggcttataataatagccgccattaacaatcgagcaaaaggctgatacaacctgtaccatcgttgcattgtatccctggccaaaggaacttgtccacatttcaacaggtcccatattgtctgctgtataaatcgtaccggcacagcttgcttctcccggaagatcgatacctgtcaactgccccagtccaaacagtttctgcatcttcgtaaaggaagtaataccgattctgtcgctgagctgcatcatgacatcattgcaggaatgtgtaataccgcccgtcagatctaattcaccatgcacactgttgcaggaaacaaaagtactgtcgttctcataggtctgaccaccgtcacagtagaattgttcgttcgggtctacaagtgcctgatccagcgcataggaaaccgtcatagtcttgacggttgaacccggctcatagctatcattcacacagaagttacgccagagcgtataaagggcatccgacatttccttatccgtcatgtccgccagctgatcctctgtgtaaccggccactgttagatctctcgggttattcagatcaaatatcggagcactcgccatagccagaacctctccgttattcggattcataacaatagcagccacgtttttggccccggtttctgtcatgaactggctgatatatttctctgcaatacgctggatattgatatcaatggttgatacaactgtcttgccattatgtggttcctctgtaacggtctggagatccacattatccgtgagataaccatactttcttccattggttccggacaatgtatcattataatagctttcaattccccagagaccgctgttatcagaagctgtaaaaccaatcagatcacaggccagcgtcgaaaaaggatagattctctgatagctttcttcaaaccagattcccgatgaaacagccttgatcttctgcgcatcattctcatcctctgaagcaagaaaatcatcatacggctttttctcatcatatgtcattttcctcttcaaaacgacataccggctgtccggctgttgcgttaaaatcgtatccacatcatccttgctgattgaaaaatattcttccagaacttctttggcgtattcagaagccttatcgatattgctgtgcgtaatgacatacggatccaacaccagattgtagattttctcacttgttgcaagaacggttttgtttcggtctgtaatatcccctcgtttatagggaattgtctgtccatcatagttgagcaacgagagtacattcttctcgtaatctgtaccgtttttaacattgatctgcacaagtctgaccaccagcagcacaaagcagatcagcacaaacaagaatacaacgagcagtcttcttctgttcgtctttgaaaatttccgtatttttttatccgccatctattaatcacctaaatttaatgtctattttattttccgccaggtatagattcatactgtcgtatataatcattattgctgctgtcataataaattacctgatcttcaccggcatagaccattcccagtcttccggttgcaatctggtaaatctcatccagatcaatggtcttattcaggctttccttcagtgaattattctgttcctggacggtctgcagctgactctgaagggctgtcacagcctgttcattcttcttcaatacagaactggaatgtaaatacataaaacaggcagctagggtaatgcctacagatgtcacaagaaacagtgtatacttcagatcaaaaaccgatacacgcttcttatgctgtacagtccgttgtttcggcctggactgtacagctttatttcttcttttaggtgtttcaggctgttcattcagccttcttgctgtgtttccatctatataatagcgttcgggctctcttcgataagccatcgattggtttgctctcttctctgccatccaacgccaccctttcttcattaacaggaccgtctgcgcctgccgcatccgatcgttttcttattctctgattctttcaaaaactctgagcttcgcgctctttgaacgactgttcacttccagttcttcttcacttggaagtatcggtttcctggtaatcactctgccctttgacttcttcccgcaaacacatacaggaaaagacggcgggcatgtacacggccgttcattagtattgaaaatgttcttaacaattctatcttcaagtgaatgaaatgtgattacacatattcttccatgatcattcagcagatcgatcatctgatccagcgtattcttcaaaacatccagttcatgattcaattcaatgcggattgcctgataagtcttcttggatggatgaccacccttggctctgaccttcgccgggatagcagcccggataatatcattgagttccccggttgtctcgattggctttttctctctggccataacgatatgcttggcaatattgcgcgcaaacttatcttcgccataatctctgatcatatgaaacaattctgtttctgtataatcattcacaatgtctctggctgtcttcgtctgacgctgatccatgcgcatatcaagaacggtatcttctctgtaagtaaatcctctctcaacagtgtccagctgataagaggatacgccaagatcgagtacgattccatccacaccatgaatgcccaaatctgcaagaacctgaggcattgcactataattgctgcggacaatggtcactttgtcgccaaatggtgccagccggtctccggctgcttctattgctgctgcatcctggtcgataccgatcagacggcctgtctcacccaggcgctgcaaaacagcactggcatgaccgcctccgcctaaagtgccatctacatagatgccattctcttttatatctaattgttcaatcgtctcattcagtaatacagaataatgctgaaacgtcataatgtcctcctatatattcacaccgagactcgccatatgggcagcgactgcttccatatcctcatcatccatgtcattctccacatcccacttctctgcactccagagttcaattcgggtatccatacccgtcagtacaacatctttctggaggtctgcatacttgcggagtgaagccggtacaagaatacgtccctgcttgtcaaattcgcattctgttgctcctgacataaaaaaacgtttgaactgtctgctctctttatcaatggtagataattctcttaactttgcagtaaattcccgccattcatccatcgggtgaatccaaagacaaccgtcaaggcctttggacaaaataaatgtatcccccaggtcttctctatacttctggggaatgatcactctgccctttgtatctattgtatgataatactcgccaataaagccatccattccatgtccacctttgtcttacggaaatcttcatgtctgccacaacataaaggtattaagtcccacttaaaaccactatttaccacaaatcaccacttatgttatttattttagactattccacacaatatatcaataggtaaaatacaaatttacttttaaatttttgtaactgttcagagctaacctccaaaatgctatgcatttcgtcggtgtggcgtatccgccaaataaaatttcaaaaacagtcttaaaaatgcaagcattttatacctgttttttgaaattttgcttggctctgaacagttacaaatttttgtaaacagaatgcagttttatatacaacaaaaacacactgtctgatgggatcatcccccacctgacagtgtgtttcataagattcaaaatattctgttatgcagctgtctttgatgcctttttcagccggcttcgcttgtacattataacgatcaatgcaaaaacagacagacaggctgacaacacctgtgacacaggcaaacctatatacggaagcaaaagctgatctgttcggaattgttcaataataaatcgcccgataccatatccaaacaagtacatcatgaaaagttccccattaaacttcttgtgcttcctgtaaagcaggatgatcaccaaaacccccagattccagagagactcgtacaaaaatgtcggctgaacctgaatgtactgaacaccatcaacggtaactgccttgtctaaaagatcctgggtcgtataagcagcctcatccattctgatctgcatagccagcagaccgtcagaataaccgccgaaagcttctctgttaaagaaattgccccatctgccgatgatctgcccgatcagtagtcccggcacaaccgtatctgccatcagaagcagactggccttcctgatcttcgagaaaataatcatgcagatgaatccgccgataatgccgccgtatatagccaggccgccctgccgcagattaaagatctccaaaggatgctgactgtaataggaccactcaaaggccacataataaattctgcatccgacaatcgctgatataatcgcacacaaagcaaaatcataatacatctccggattctgtcctgtccgtttggcttcatgcacagccattgcaataccgcacagcatgccgacgccgataataatgccataataggcaatatcaaaaccaaatatagagatactctttcccagatgttcaatcacaatccccaaatgcgggaaccggatacttgctcctgtcatcattgctcctccttctgtaattattctgttccgatccggacacttccaaacaattacataaattctatttttccattgtaaactgctttattgcaaaaatcaagtcataaaatagctgttctttttacaggaactgtgctaaaataatacggaaaactgcattgaaagtgaggaaatagatatgaaattaggtattgttggtctgccaaatgtcggaaagagtacattatttaactctctgacaaaagccggcgcattgtctgccaactatccgtttgcaactatcgacccaaacgtaggtattgttgctgttccggatgaaagaattgtgaaactcggtgaattgtatcacacaaagaaggtaacacctgccaccatcgaatttgtggacattgcaggccttgtaaaaggtgccagcaaaggtgaaggtctgggcaatcagttccttgccaatattcgtgaagtagatgctatcgtccatgttgtccgctgtttcgaagatgacaacattattcatgttgacggttctgttgatcctgccagagacattgagacgattaacctagaattgattttctctgatatcgagattcttgagcgcagaattgccaagattgccaaacaggcaaagatggataaggcttatgccaaagagcttgaactggctcaggctgtcaaggcgcatcttgaagacggcaagatggcaagaacatttgaagtatctgacgatgaggacgaacagatctggtttaagaattacaacctgttgactgcaaagccaactatctatgctgccaacgtagctgaagatgatctggctgatgacggcgcatccaatccacatgttgccaaggtaagagaaatggctaaggaagaaggcgctgaagtttttgttatctgtgctcagatcgaacaggaattagctgaccttgatgacgatgagaagaaggaatacctggaagacctgggtgtttcctccagcggtcttgacaaactggtagcagcaagctacagcctgcttggtctgatcagtttccttactgccggcgaagatgagtgccgtgcatggacgattaagaaaggtacaaaagccccacaggctgccggcaagatccatacagactttgaacgtggtttcatcaaagccgaagttgtcaactatcaggatcttcttgataacggaagtctctctgctgccaaggaaaaaggcattgttggtatggaaggcaaggaatatgttgtcaaagacggcgacgtgattctgttccgctttaacgtttaaatcataaataagactgtcgcatgacggaataatgcggtgcggcttctgagacaatatatggattcaaaaagagttattcagcacaggcacactctcgttgccaacgtctggtagcggtacataaggcagtacaatacactgcctaagtaccggccgacgttgaagcacctgtgttcgaataactctttttgaatccattcagatatagttctgcttattccacgatatcaagcagttcttcaaaggtgtgaatttctgcatcgaaggctttgacctggccaaaaccataggcggcgtaaatgaatggaataccggcctgtgcagctgcatcggcgtctccctgggtatcaccgatgtagaccggagatttgagtccgtttctttccatgaccaggcggatgtttgctcctttagatttgccggtcacaccgatgcattcacagtctttaaagtacttcgctgtgtgattgccgctgtaaaagctctggatatagccgtcctgacaattgctgacaataaacagcggatatttctctgaaagcttctgcaaggtctcttccagcttcgggtagagaataccgccatgttctgccaaataaatattctcctgttcacagcattcatccatcagacgcattctcagtgcttctgtctgttcaggaaacatattgcgtgctatctgatcaaggggtaagccgaaattggaagctaattcctccgctgtcactttcttgtgaatctccggataatgttccaaaacaagcgcccatgtagcaactattccctctgaagagtcccagagtgtaccatctaaatcaaaaatcaaactatctatcttcatcttcttctcctttctgtatcttcctgcggcattcaccgcagcagccataaaaaacagtcttactctcatccactgcgaaatcctctttcgccatcatttcatctgccagttgccgcatgtgttcactttcaaaatgaatcagtctgccacactcactgcacatcagatgataatgatgtctgcattcaggatgcccgccgctgaactgatagcaggccggtgacttttcacttaatgtatacttacgaatcttcccctctgtctccaaagacttcagaactctgtatacggttgtcttgccaacccgttcttcacctgcattcagatcatgaataatgtcttctgcacggacatgagtgtcctgtctgtctttgagatattcaagaatcatcgatttctgtcttgtatttctattctgtttatcatcagacattctctgcatcctccgaatatttattcttatctcatataattttctcttcctattataatagcttttcttttatctgtacagtacaaaatcaggcgcaaaaatacctgagagatactgtgttcattcatttccctcaggtatttcctattctgtattgaatttctatctgttgattctcaatgctgtattacgcaagttcgacttttggaggcttatctccttccggatcttcttccaaaattgaaaatgcaatattcgttgcatggtccgcaactcgttcaagattggaagctaaatccgaaaacatcatacccacctgagcactgcattcgcctgttgtcagacacttgacatgtaaattctgaagctcacgctctttcgcatcaatggcattttccagatccagaatttcctgaagatggctgtcatcttcaagattgaacatatccatcgaaagatgaagaatcttcaccgtcatctcctgcattctgcggatctcatttccggccatgccattaatatcttctttcatatcaatcaacttctcaacatcttctgcaatattctctgcatggtcaccgacacgttcgatatcgctgacaacatggaacagggcccccaatttcttgcggtctcctaccggtaagctgatctggttggctttaacaagataatctgtgatttccttgttcatatagtcgatacgcttctcaacctcaaacacttccttcgccgccttgtcatccttagtcaggagtgcatccagcgccttttccagattgccaatggcaatttcacccatatggctgatctcactgcagacctgcggaatagccgtcgccgatgaaagtctgtctccatcaccaatatacttcatttcatattcatcttctacatcattatcctcaccaggtacaatgaaataagtcagtttgacaatccaactcataaacggcatcagaatgataacctggaagaccttgaagatggtatgcgtattggcaacacatcggccaagattgccgccggaaatatgcatgatcaacgcttcaatccaattggaaccgatcaaaagaataactgccataatgatggaaccgataatattgaataataaatggatcaaagctgcacgtttggcattcttcttaccactgagactggcaagcatcgctgacatgcaagcaccgatattgcatccgagaataataaagaaacaaatcttcagcggaagtaatccctgctgtgccaaaagaagcacaatactgactgtcacagaagaactctgtacaatcgccgtgatcaccaatccaagcagcaaagcaaagaatcggttgtccagagacatgaacagattctggatagccggaagttctttcaaagcacccatagaagaagacatggtactgattcccaggaaaaggataccaaaaccaatgacaacctctccggcttttttcaccgttggattcttgaagatcatcagcatcagaacgcctgccataataaataccggcgcatactgagacagattaaatgaaacaagctgtgatgtaacggtcgtaccaatgttggcaccatagataacgccaatagcctgataaagcgtcatcagaccggcatttacaaagctgacaaccataaccgttgcggcactggaggactgtataatcgccgtaaacacaacgcccacaatgatacccacatatctgttcttcgtaaacaattcaagaataccacggagtttggcaccggctgccttctccaaactatcactcatcaacgtcataccatagaggaaaagacccaaacctcctataaggcccaaaaccatacctgaaatattcatcttttttctccttgattttacttatgtaaaacttatgtaaaaatacaccaataacaactttaatatatattgcgccgcttgacaagtcttttttttagaaatttgctttatgttagcttccggaaacattattatgtcaacttaattcaataaaaataattgaagccagcacacttttccctaaaatttcctatttttcagcttgtaaattatgtcaactcctcttttttattttttgcctgcgttttcagaaaaaagtagtaaaaaaagaatcggatctcttttggaatccgattcttcttaatctgtatagacacttatacactaaaaatttcttatataaatgcttctgacagtctgtttagatcactgaacttctgaaaggattttgtccagtttctcatacatttcatccacattttcttttgtgataacaagcggcggtacaaaacggatgatattagtacctgcagagatgatcagaagaccgttggcaatagattttgcaacaatatccccaacaggaattgtaaattcaagacctctcatcaatccaagacctcttgtttctttgatgaaatcataacgttcaactaacgatgccagtttttctcccaggtaagcgcctacttcattgacattgtcaagaatatgacggctttcaaacatgtcaaatacaacattcgctgctgctgtagctaaaggattgccgccatatgtagacccatgatcaccggctaccaatgccttctcaaccttttctccggcaacaaaggcgccaatcggcacaccgcatcccagtgctttggcaacggtcaggatatccggttttacatcgtagtaatcataagcgaacatcttgcctgtacgacccataccgcactgaatctcatcaagaatcaacagaatgtccttttcatcacagagcttgcgcacaccctggataaactcacgtgtagccggatagataccgccttccccctgtacagtctccataataatagcacatgtcttatccgtgatcttagaagcaacatcctctaaattgttatactcagcaaacaccaccttgtcaatcagtggtttgaaggcttcctgataatgaggattgcctgtgacagaaagggcaccgatacttctgccgtggaatgaatggttcatggcaatgatctcatgatctgtggaaccattatctcttgtccatgcatacttacgggcaagcttgatggcaccttcaatggcttctgtaccactgttggtaaagaatacctttttaaggccgcaggcattcaccaacttgtgtgccgcttctgccataggctgtgtatagtacaaattggacacatggatcattttgtcgatctgagccttcagggcatcattgtattctttgacattgtaaccaaacgcacatacagcaatcccggctgcgaagtcaagatactttttgccttccacatcgtaaagataaacgccatcaccgtgatcaagcacaacagggaaacgattatatgtatgaatgatcgcctcttctgcataatccataatttctttattgttcatgataatacctgctttcttcactgcccaaaattgcagtaccaatacctttgtttgtaaagatttccagaaggagacaatgcggtatacgtccatccagaatatgtacgcgtgaaacgccgttttcaattgcctcaatacagttgttgagcttcggcagcataccgcctccgataaacccttcttcaatcagtgcatgggcttcttcacatgtcagctctgaaatcagtgtatccggatcctccggatccttgtaaacgccttcaatatcggtgaggaaagccagtttttctgcattcacagcctttgcgatctcacatgcagcatcatccgcattgatattgtaagtattgtaatcttcatccataccgatcgggcatacgattggaaggaaatccttctccagtaaatcgtagagaatcttcggtgtaacttctgtaatctcacctacaaaaccgatatcctctccattggagtatttcttctttaccttcagaaggccgccgtccttgccgctgataccaactgctttgacacccagttcctgaaccatctggacaaggctcttattcaccttattcagaaccatttctgcaatttccatagttggcgcatctgtcacgcgaaggccattgacaaaacgtgcttccatacctactttattcacccaacggctgatttctttgccgccaccgtgaacgatgatcggcttgaatccgacaagttttaataaaacagcatcggcgatgacattcttcttcagttcgtcattcatcatcgcactgccgccgtatttgatcacgataatcttacggttgaatcgctgaatataaggcagcgcctcaatcagtacttcagcctttgaaagatactgattcatatccttttccatttttctatttctccttttccccgttaattatgaacggtaatccgcattaatcttaatataatcatacgtcagatcgcagccccaggctgtagcttcctgattgcccatcttgatatctgcaatcgcagttacctcaggctcggaaagaatctttgttgcttcttcttcactgtaatccgcagccacgccgtctttcatgatctgaatcttgccggctgcactttcaaagaacagatccactttttcaggatcaaactgtgcgcctgaataacccattgcacacagaatacggccccaattggcatcatggccgcagatagctgtcttaacaagactggatgtcacaacagacttgctcaatgttactgcctgttcctttttttcggcaccgatgatcttcacttcaaagagtgcagatgcaccctcgccgtctcctgcaatctttctgcagagacatgcattcactgcatgaagtgcttcacagaaagctttgtaatcttcattctttgtatcgatcaaaggattgcctgcctgaccattcgccaaaagcagcaccgtatcattagtagatgtatcgccatcaacagaaaccatattgtaagtgtccttgatatcttcgctgagtgcttcctgaagcagtgctttggaaatgttggcatctgttgtaataaaaccaagcatggtacacatattcggatgaatcattccagagcctttgcacatgccgcccatagtcactttcttaccgccaatctcaaacgtcacagcgacttccttcggaacagtatctgtggtcataatggcttttgctgccagatgaccggcgtcgatactgccgtcaagagcaggtgccagcatatcaatccctgcttcaattctgtccattttcagctgcataccgataacacctgtggatgccaccaatacagcatctttctgaataccaaggacttccgcagccttcgctgctgttgcttcgcagtaagccattccctgcacacctgtacaggcattggcaataccactgttgcaaatgactgcctgcgcatgttcggattcatatacaacctgtctgtcccatttcaccggagcagcctttacaatgttggttgtaaaagtgcctgcagccacacatggtacatcactgtagatcatggacatatctgtacgcccctggtatttgatgcctgcagctgcactggaagccttaaatccttttgctgctgtcacgccgccttcaatatattccatttcctgccacctcttttattcattaaacacagtcatgttggcctcgttcaggttcagatcataataattccgatcatcctgacactgccagccgacctttttccaaaaggcattaccgccctcgtttcttgtaaatgcgatcagatagactttattgatctgctctgccttcaatgcttcaatcgctttggctacaagcttacgcccaatgccatgctgtctgtatgaagcatccacacaaacatgatacagacagccctgacggccatcatgtccgcagagaatggaacccacaagcttgccatccatctccgccaccacactagtgttgggatttctgcgaagaaatcgctcaatgccctctctggaatcatcaatgcttcggataccaaagcccttgataccagcccagagcgccgccacacgatcatagtcatcaatcgtcattgttcttattataatatcattcattctaatattctaccttcgttttcttatgggaacataggcacaagattcaaacctgtgctctcatccagaccaaaggcaaggttcatgttctgaactgcctgtccggctgcacctttgacgaggttatcgatggctcccatcataatgacacgatgtgttctcggatccactttgaagttgacatccacataattgcttccttctacccagcgtgtctcaggacatacacccggtttcagtacacggacaaacttctcattggcataatatttgtcataagccgctctgatctgctcttctgtcacgccctctttcaaagaagcatacgctgtagccagaatacctctgttcatcggtacaagatgcggtgtaaagttgatggtgattggataaccggctgcataaccgagctgttcttcaatctcaggtgtatgtctatgtgttgcgacgccataagccttcatattctcattcacttcacagaaaaggttagccgtcttggcaccgcggcctgcaccggatgtaccggacttggcatcaacgataatggtattcgggtcaatgaggccttcctttactagtggatagcatgtcaaaatagaacatgttgtataacatcccggattggcgatcagtcttgcacccttgatgtcttcacgattgatctcacagagtccgtatacagcctctttaatataggaaggactcttgtgtttaatgccgtaccatttctcataaacttctacatctttaatacggaaatctgcgctgaggtcaataatctttactttatttaaaacatcctcattcacaagagaggcacataagccctgtggtgttgctgtaaagataacatctgccgcatccgccagtgcatccatgttgtcatccatgcacttggcatctacaatctgaaacatattctggaaaacatctgcatactgctgatcaatataacttcttgagccataccagacaatctcaacatccggatgctgcatcagaagacgaaccagttcctgaccggcataaccggtggaaccgataattcctgctttaatcatttttcataactcctttatcttaaaccgctaaaaggcagtttattcatttttcgttcaacacctatctatattaatacatatcttcaattaagtaaagtacaaaaatcaaaaaaatattcataattatgcatgcacaattaataaaaatacattttttacgaaaaaactattgcattattcatacttctggtgtatattaattgagtgctcgcaagaaatatacactttagcgaacacatcatcacaaatgaatgaacatgttttttatataggaggattttacaaatgaaagagaaagttgttttagcatattcaggcggtcttgacactacagccattatcccatggttaaaggaaacatttgattatgaagttatctgctgctgtatcaatgttggtcagggcgaagaattaaacggtcttgaagaaagagccaagatgagcggcgcttccaaattatacatcgaagatatcgttgatgaattctgtgaagactatatcgttccttgtgttcaggccaatgcaatttatgagaacaaatatttacttggtacttccatggctcgtcctggcatcgccaagaagcttgttgaaattgcaagaaaagaaaatgctgttgcgatctgtcatggggcaacaggtaaaggtaatgaccagattcgtttcgaacttggtatcaaagcactggctcctgacatcaagattatcgctccatggcgtatgacagatgtatggaaaatgcagtcccgtcaggatgaaatcgatttctgtaaagcacacggcatcgaccttccattctccgcagacagcagctacagccgtgaccgtaacttatggcacatcagccatgaaggccttgaactggaagatccatctcttgagccaaactacaatcatgtacttgtgctcacaactccaccggaaaaagcacctgacaaaccggaatatgtcacaatgacatttgaaaagggtgttcctacttctgtcaacggcaaagaaatgaaagtggctgatatcatccgtacactgaatgaacttggtggcaaacatggtatcggtatcgttgatatcgttgaaaaccgtgttgtaggtatgaaatcccgtggtgtttatgaaacaccgggtggtacaattcttatggaagcacatcagcagctggaagaactggttcttgaccgtgcaactgcagaagttaagaaagaaatgggcaacaaactggctcaggtatgctacgaaggcaaatggttcacaccattacgtgaagcaattcaggcatttgttgaatccactcaggaatatgtgacaggtgaagttaaattcaaactttacaaaggcaatatcatcaaagccggtactacttccccatattcactgtacagcgaatctcttgcatctttcacaacaggtgacctctatgaccaccacgatgcagatggattcatcacactgttcggtctgccattaaaagtacgtgcaatgaaaatggctgaagtagccaacaaaaacgctgataaataaataaataaaaatgtctcagtaatatctgatggcagaaggaaataaaacatccctgaaacaggcgcatcgccaaatgtttcagggatgtttttattcaaaataatagcacgctattattaaattatcaatagcgtgctattaaaatagatccagcatattatccagataaatggcttctctgacgttcaactgatattctggctttgtcatgtagtataacagaaattccagaaccagtgcactgccaagcccccgcccttcgaccttaaaattggaaaagcccataggtatatagatatttcggatatcatcaatccctataaatcccggattcatcattgcctttgaaaaccgatagccctgctcagaggcaggcgccttacagtgatgttccggtgcatttacaccaagattcctgcggctgaccgcttcatagcagtttctcctgtccttacagccaaaccagcagcattcattgcacaaaaactccactttatctttctgtatctgtgtcaatgtatccagctgatccatctgtttatttaaacgaaaatccggcacaacatagcgaaaatcatcgcgctccacctcatgccggaatacctcaaaatccgtcagcacttttgttgtagaagaaatgaagtataatttcgggtaattctctttcaggtaatccagcagcatctccgaatgaatgatcacgccattctgtacacggctgctctctgaaaacaatgcacataaagtattacatcttttatctgaaagatgctcttttctcagcagggaattactgaaagtaagccttgccgagatgccatatttctgcataagggctaaagcatcactcggatcacaggtttcatattccacacgaccgccgccccagatgcaatccgatggtgccccgtagatagagccaatctcacaccagtcataaaagtattctctgtgctcatggaatacggacagaaaaatacgatacaattcataaaattcaaacagcccagggaggtgaaaataagctgtgtttctttttgtcttatctttactcatattttctcaatactattacgctttcgcaatagacataacaaccatagcttcatagatatttactttctttatgataacatgaaatgaaccatctgccaagtaacaagcgtgtgtccaaaacagaacacacgccaccaaatttacttgttattgacacttacaatccgataataaactccggatgtcattttgtaaacgataatatagaacactgcaaacatcagatagcatcccagtgccaccattgccagaaactgtgtccgattcagcccaaataacaacagcaatttagaaatcatcggaaaagcaaacagcaaatgcaaacctgccagcagaagcggtgcaaagaaaacaatcaatatctgtgaattaatactctgccggatatctttcttcgtcatgccgactttctgcataacgacgaatcccgactgatcctcatacccttccgtcacctgcttgtaatacataatcagtatagccgcaaagacaaagacaattccgagcagaatgccaagtaccagcaatccgccaaatgtaccgtaaaagctctctttattaaaggcatagctttcataactgacataatcaataccttcctgctgtgatgcattaagggcggcaaatttattatttaacacaccctctgcagccatctgcgcatcatcactgccgtctaaattgcagccgtaatagcatttaaagtagacgttttccatattttctgtcatatactgagccagattgtactgagccagtttttctgccacctcatcaaaatccggcacaaaaatatagtaaaccttcgttgatactgaaccatccatatgaatcgccttaaaatttgaaatcaccttttttacattcaactgaatgtcattgtgaatggataatatgtctgtattattttcataagagtcgccatacacagcaacaagcgcttcacccgcatcgagtgtctctttttccccggtcacacgattatatacactgagcggcgccacataaacttcatcgacattgaaagctgttgattcattcgtttccatatccatcaactcatctttcattctgaaattatgaccttcaagcttcccataaaaaaaagcagatgtatattccagaacatcggaagctgtcagatggctttcatgaagcgtctcctccatcagctgacgccaattagcctcactttcttcattcagatattttggtgcactgacatgaacctcataggacaggtctctcggataacgctcacgcataatgttctctactccggcataaagacagatggttgatgaaagcatcaccagcaccatagtactcagtacacagatggaagccagaccggcaccatttcgcttcatgcgataactcattgaagcaatagatataaagtgttgtttcctataataaaaacctttattcttctgtaaaatccggcaaagggttactgatccggcaataaaaagcatatacgttgctacgataacaagaataaccgcagcaaaaaaccatgtcaaagccacaatcgggtcttcgattgttaccgccaggccataagcaatggcaagcaccacaacaccaaccaacgccagtagccaattgcccttcggcggtttttcaccggtatgttcgcttctcagcaattccattggaccggccatggtcatttttcttaaagcactcaacagaatcagaataaaaataacaagaaaaaccagaatagtttctctgatggctgaaccttcaattctcagcttgaaatccgtctgaccattcagaatattcaccatccacaattctgcaagttttgaaaaaacaatcccgaatataagccccgctgcaagggaaatacctgcaataatggccgtttcccagaaatgaatatgtgccagattgcgtttatccataccaaggacattgtacaaaccatattctctgcttcgccgtttatttaaaaacgaatttgtataaaaaaggaaaatcaatgtaaatagaccgatgatccattttcccaaattcaacatgccctgcattgtttctccgccccggatccggaccagaacattgctgacactcagtgcgtcaataatataaaacatcatgaccatggcaatacatgtaaaaaaatagggaatatagagtttcctgttatggcagatgcctgaccaggccattttcggataaaaagattttctcatgcccgatcaccgcctgtcgtgagaagagtcagcgtatcggaaatcttttgatacaattcctgacgtgtatgatgtcccttataaatctgatgaaaaacctcaccgtctttgataaataaaactctgcccgcatggctggccgctttgacagaatgtgttaccatgacaatggtctgtttatcctgattgattgctgagaaaaggtccagcaattcatccgaggacttggaatccaatgcccccgttggctcatccgcaaggatcagcttcggatgtgtgatcagcgctctggccaccgccgcacgctgcttctgaccgccggacacctcataaggatatttctttaaaagctgtgtgatgcccaattgttttgcaataggctccaggcgcttatgcatctctctgtaattcttgcccgcaaggaccagcggcagataaatattatcctccagagaaaatgtgtccagcagattaaaatcctgaaaaacaaatcccagattatcacggcggaattctgccatagcagattccctgatgtctgcaagattcctgccgtctaacaatacggtgccgcctgtaggtttatccagtgccgccagaatgttcaacaatgttgtcttaccggaaccggattcacccatgatggccacatattcgccctcttccacactaaaggacacatttttcagtgcctgtacctgattaccgccaaaacgggtggtataaagtgtaccccttgtcaaggacaaattaagaagaagggatttgttctttctagccagtagatggctatatcagtttgttgctgatgaatacctttatgaaatatgcttctaaagaatatgtttatatgcctcctacctgctcctgtgcaacaacagccgcacctgcagcggctgccggtgtcgcatttctccatggcctgacccctcagcagatcaatgatatgctgtgtacagcacaggttcagatggccggcgtagtatgtgatggtgcaaaaccttcctgcgctacaagaatgtatgttgccctgtttggttctttgcaggctatgatgatggcaaaggaaggcatccgtgctacaaatgtagaaggctttgttcataatgatttgaaggttacgctggaaaatctttatcgcctgcagcatgatgttttacataacaaagtggatgcaatcctgtgggatattgtaaaagaacagaaggttattcattaagaagcgtcttaggtagattccgatttatcccgatgcaaatataggcagtgtttgattcttgccaaactgcgactgtaaaccaactgcaccttgtgctacaataagcttgtaagacaggtaggcatattttaggtcaaagtaaagagagggctgtcgctttaacgaatgaattttcgtgaagcggcagcttcctttttgctgttctaaggataaaatctatcaaaaaacgcttttcattgttacaggctattattaaagacgcactttaataagccattcctgatggcttgaaaaattgttttgataagtcaaaatttaggcactttttatcggaaataaatgtgttccggttcttccattttgaatcttattatgcagtttgtttatgttgcttgccatggcaagcaacgtgctctctgcaaaaacatttgcatttcctttgcttaaatatctacggaactgcatatcctgttttaaatttccaaaggagccttccgcctgtatgcttcggtttgtcctgaagagaatcccttcttctgagagtatccggtctaaaccttcttttctatgttttagaaatgttttcgcaacctgaagtgtctttgtccgttcttccaaatgggttttgcaattattccctttgatgcattcgcttttgtaagggcatccattacagtcctcacatttataaatcgttttttcgcttacatatcctgttttgctttttgagtggcggatatgatctacacctaattttttaccatttctgcaggtatagatatctttttttacatcatactccatattttctatcttaccgatatcatttttatatttacgggtcttggaaatctcatagttcgcaggttttatataagaaagctgaccatttgcttctagaaagagatagttttcttcactttcatatccagcatctgctgttatgtttttatatttgaatttcaaatgctcctgtgcatctttcaaaaaagggatcaacgttgtggtatcagtaggctggggacctatggtaagccatgtgatgtattcagaatccacgccatgctgaagattataagcaggctttaactgtccgtttcccatggcatcctccttcattcgcataaaagtagcatcatgatctgtctttgaataactgttgcgtcccgcacagatatgtatctgctggttatattttttgagccggttcaaataactttcaagagtttcaatgctcttttgaagcggcgtttttcttttcccaatcccatgcacaaacactatattttcagtttcttttaatgcatacagttttttgcggagcttctttacatgctttatttttattgtatttccataaacgatttttatatcataaagcaactcacactcagctacaaaatcagcaagtttctgcaaaagttttgcctggttttttgttactgccttcttccagacgaaagtatacttattggcactggcttcaatttttgtaccatcaataaaaatggtctctccggaaatttcccccatgcaaaaaatggattggatgcatgtgtaatagaagcatgtaagcctttttatccgccacagttgattattcaagatgagttgcatctgatatcaggcccattaggtacaatctatggcggttatgaaaccattattgaggatatgtgttgtcttgagaaaaatggaaagaaaatacatccgaaatatgtagtttctacggcaactataaagaatgcgggagaacagattaaatgcctgtatgcaagggaaaactatgcccaatttctccctagtggattcgacactagagatgcctattttattcgtgagattcctcttgtatctaaagacttagaagacttgacggaggatgatattacagaactactggagaagggtgagaagcctttcagacagtatgcgggtatctgcgcaagtggacaatctgttaagactactttaatcaggctatattcggttcttttacaagaggcttttattttgtcggaagatcctaagtaccaggattatgttgatccttattataccctggttggatactttaactcaattcgcgagcttggtggtgcggtacgtttgctggacgacgatattaacagcagacttaaagtattaagaaaaaaatataagaatgcaaggcagagatttttaggatttgacggtaagaaagaaattacttctagaattccatcgtatcaaattgctgaaatattggaaaagctggcggaaccatttgatccatccaaagaaagacagagttgcggaagatgtgcagaaatttgtccgaagcagtgtattgagaaaagaggttcattatgatttttaagaaaatcagaaaagggcatgctgactggagaaactttttatgtagtactccggcaagggattatgtattccaaaaggatgcatatgaagaccagattgacagggcagcaaagaatataagaaatacagactgtgttataatcggggcaggagccggagcatcgacagctgcgggaatccaatatggtggtaaaaggtttacagacaattttgcagaatttataaaaaaatacggtgagtactacatgacagatatgtatgcagccggattttatccatatccgtctgaggaggcaaagtggggatactggtcaaaacatgcattgatgaaccgctttgatcctccggcattgccgctttatacagagctttatgatattgtaaagaacaaagaatattttgtacttacaaccaatgtggatcatcagttttataaagcgggattcgatgaaaaaagaatatttgcaacacagggagattatgggaaaatccagtgccagaaagcctgtcatccaaagacttacgatgcaaaagacctgtttcgtaaaatggataaagcaagaagagactgcctgattccatcagaacttgtaccaaaatgtccggtgtgtggcggcaatatggctatgaatctccgttgtgataattattttgtggaagatgaagcgtggcatgaggcagccgacaggtatgcgggttttctggaacagaataaagataaaaaggttgttcttttggaacttggagttggatttaatacgccgattattatacgtttcccttttgaaaagatggtgagggagaactcgtcttatagtttgatacgcatgaatatggatgaagcggtagttccggaaagcttcgggaaacgtgcaatcggtattggcggtgatatggcaaaggcaattactgatataaggggggctggtattatgacacaggatgagcgaagagaatatctgattcagtatcttttaaaagaaaaaataccgtttggcagacagaacattcctacggataagcaggggcaggaaaatctgctccgctcacttatgaacgtcagaccgccaagaccaatcagtaatgattttttgaaaatacaggatgagtatcttacagaaagaaatatagagcgtggaatcacagatattgatacgcttgcacctgtaaaatccgattcgagattatatatctggcagggggatattaccactttgaaatgtgatgcgatcgtgaatgcgtgtaactcacagatgcttggttgtttttcaccgatgcatgcctgtattgataactttattcatacttatgctggaatggaacttcgtctgaaaatgcatgaaattatggcaaagcaggggcatgaagaagagaccggcaaagcaaagataacatcgggatacaatcttccgacaaaatatattcttcatacggtaggacctattatacaatggaaagtcacaaaagaagatgaagacctgttggcaagctgctacacagagtgcctaaagcttgcagctgatactggtgtggaatctattgcattctgttgtttgtctacaggtgtattccgttttccacagcaacgagctgccgagattgcaacgaacactgtaaagcagtatcttaacaaagacagcagaataaaaaaggtaatctttaatgtgtttaaggatgaagatttaaaaatatacagtggattgttataagcgtctgttgaaatatccgataaatcttattgtactgttactgcctgagaatgtgatttatattggaatccgatgttaagtgaaagactggtgggaagaacgagaatattattaaaaaaagtggacagttcaccaattgggggctgtccacttttaatatagaatccaaaaattaaaatgaatctttttatctaacattttctattatgaatgacataaatttatgtgctacattactcaatcgttcatagtcctgataaatgaaagcaatcttctttttgttgtttacctataataacgattggagtagtcgattatagacactgcaatcaaaaaatctgaaaatatatttatcaacattacataaaagtgtgtagacgcacataaaatgggaatacatattgaaattcaggtcgttctgtgatagaatctcattactaaaaagtgtgcagatgcacggaaatggggaatataacgttggagattaaaagagacgcttacctacagcagctgatcgagcgaaaagataatggaatgataaaggtgattaccggcattcgtagatgtggcaaatcctttttgctgtttaccatctttaagagatacttactggagaacggcgttgatgttgatcatattattgaaattgcattggatggtattgagaacgaagaattaagagatcccaaggtatgcttcaagtacatcaaggatgccatgaaagacgacgggaagtattatctccttttggatgaagtgcagttcatgccacgatttgaggaagtgctgaacagcctgctccgcatgagcaatattgatgtgtatgtcacctgaagtaattccaagttcctgtccagcgacattgtgaccgaattccgtggcagaggtgatgagattagaatctaccctctctcctttgcagagttttattctgtctatgacggcgattatgatgatgcctgggatgactacatgatctacggaggattgccgcagatcgtaagtttccagagcgaacgacagaaagcggactatctgaagaacatctttgcaaatgtctatctgaaggatgttattgaaagaaataagattcagaacgtggatgagattgggattctggttgatgtgcttgcatctgcaatcggcgcaccgaccaacccttcaaagattgccaatacctttgccagtgagcgccagatgacttatgctaataaaaccatctccaagcatatcgaccatttgacagatgcctttttgatttccaaggcaagccgatacgatattaagggcagaaagtatatcggtgcaaatctgaaatactactttactgatctgggactgagaaatgcacgtctgaatttcagacagcaggagcctactcatatcatggagaacattgtttataacgagctgctgatccgtggctacaatgttgatgtgggtgtcgtggatatcttcggtaaggataaagagggcaaacgtgttcgcaagcagttggaggttgactttgtggtgaatcaaggaaaccagagatactatatccaggttgcatatgacatgacttcggaagaaaaacagacgcaggagttcaattctctgcgtaatatcccggactctttcaagaagatcgtcatagtaaatggcagcaaaaagccttggagaaatgatgaaggttttgtcatcatgggaatgaagtatttcttgctgaatgcgaatagtctggaattttaagtcgatttgagttgttgctgtggtgttgttctatttcaaaaaagagtgaaatgatataaataaggccacggctgatttcatgttggaacagccgtggctcagtttatttttttatccgtacaaacgagactgttccgcagattatgtagaacagacagagtacgattccgatagtgagaacatacgagaataaagatgaacttaagaacgagataaacaaaagtttgttgaattaaaaatgaaattttcaaatacagaaatgcagtgatgcagacatatatacacggtaatttcccggtttttgaaggatttaaccatatgcagtatcaaattcgcgacccggaagggtttgccagaatgctggaaacgattattgagacaggaagattacccaacccggttgttaagaagcaaagtaagataacttcaagttttgagggatgacaagcggatcagtatgatattaattgaaaatgcgtatatggttgattggtgtgtgcggtaatatactatattcagaaaaactattcaggagggtgttagtgtgagaaaatcagattgggcaaaatggttgatcgtgattccggcaatgctaggcattgtgttggtaacctatgtggatcgtataacagatatctggggatttggtgcatttatctgccagctgattgcgattttagaattggcttatggtatgcgaatcgcgatgctggcacagagtagaaagaagtcctaccggttaacaccggaagaacgacatgagtatgcacagtatttatatgagaaacaatatcaacgttaccctgctgtggcgaatcagatgcttttggttatggcaaggatgagtatacttcttgacaattatgaacgggctacacaggagctggaagatatttgtatagataaatttaatccggcacagttgaaggtgtattattacctgaaagtggttacagcagtagtggcaggagatacagaagggcttcaagagagccagatgcgttatgcagggattccggatactaaatgtgtatatccgctagaaactgagcttgctgagtggatagagcagagagatacagtgcagatggcagaagcactgaaaaaggcagtgccggataagaaagagcatccggtacggatcagtatcattactttgattcttgcatatagtaccttcttttacggattgtggtatggtataaaccgtgatatgggatatgaagtgagatatcgtttcgcagaaatatcgattgctgttattacaatcagtctggcgattcttttaatctggggaatcgtaagcttgtacagacacaattgccaggcattatccatacagcctggtaaaaacagagtggcattaataatcatttttggagctgctgcgatatttacacttttgattattggaatgagtggtctgagtgtagtgttcggaatggatggagaggagacggtgactggtcatgacagcaaatatacgtatataaccgtgcaggaggattatggcggcgagcggagatatcgaaccaataatccatttgttatgcagagtatggatggtctgtggtggtcttcggattcttcggatataatggatgctgaagaagataacgaagaatcatcggatgcggatacagaggatttcccagtgacagaagatactcagaacggagatgtggtagaagattatgaggcagaaggacagcatgatggtctgacgattcagaatgcgatgctggcggtctataattatcttcaggagaataatgcacttcaaaatatggccttcagttacactgcgaatgcaaaaggagaagtctatggtattgtcagtgaaacgcaggaaacaaaagatggtaatacggtaaatgtaagatattgtctgtatgacaatggagcgaagacggatgcggatggtaattcttgcgaagaactggtgttagaaaaagtatatccagacggtaattacgagaccgaattggtagatttttatctggtaaatacggatacgatgcaggtgacagatgaacagaagaatacgtggtaaaataaattctggggaagtaggagcattatatgacaatgggaggatatgtgggacaggcttatgcacaattgtatcctgaccggctggcaggttttatttccattgattcagcaccgctccagagaaactatgtgacagcagtggagatctgtcttctgaaaagaatggaaccagtatatgcacattacccatgggagttgcttttgaaatccgaaaccgagggagttgcaacttctgattatggcagaaacctgatgaaggaaatgatgctggtctatgatggtgatcagcatcgttatgcacaaattgccgggcatggatttcgtattctggcagaggcaatggaaaaggatctgccatatgaaatcaaatgtccttccctgttgatatgtggtacaaaggatcatgccggttcatgcattaggtataacagagaatggcatcgaaaaacgaaaattcctttaaagtggattgaaggggccggtcataattctaatacagataaaccggagatgataaatagtttgatagaagaattcctttcaaacatataaagactattgaaaacaattggtcaaccgttataaaaggacaataaacaaatcggaatcagtaggaggatcattatgagattttataacatatttttcagtccgacagggggcacagagaaagtagcagatattgttgcgaaagggacgaagctggatgctgaagaaatcgatctaattaaagaaccagataaactcatgaaggtgaaatttgaaaaaaaggacctatgtttggttgctgtaccgtcttacggtggacgcattccatcagttgtaacggatatgttccgcaaagtaaaggcagatggtacgaaagcaattattgtggcagtatttggaaaccgtatgattgatgatactctattggaactacaggatgttctagaggcatcaggatttgtatgtatcgcaggaatggaggctgtcgcagagcattccctgatgcaccaatttggaaccggacgcccggatcagcaggatgaaaaggaattgctggaatttgccgcaaagattatgcaaaacagcgaagcacaaaggacacctgcatttccgggaaacagaccatatcgagaatatggaggtgttccgcttaaacctgttgcaaatggaaaatgcacttcctgcggtctgtgcgcaaaagaatgcccggcaggtgccattccgttggacaatccgaagatgaccgataaggataagtgcatttcttgtatgcactgtgtatcagtctgtccgaagaaagcaagaaattacagtaagcttgtcagttttatcgctggactgaaaatgaagaaggtttgttccggtaggaaggaaaataaattgtatttataatagggcgagcaatacaatgagaaacatgtaaattgatacgtgaacaagtagagatttatagctggtaataggtgttttatcataatccgtgaaataagatggattaattcttcgatttacatattttttaaggtgttccggcatggtatgatggtacttataaagaacccattatatctgttggagagagcggtgaaaagttatgaagctattatttaaacaaaggttgttttcatggtttgacagctatgatatctatgatgaagcaggcaacactgtttatgtagtaaaaggtcagttgtcctggggacataaacttgtaatttatgatgcctatggaaatgaagtaggaatggttgttcagaaagtacttacttttcttcctaaattcgaaatttataaaaacggcagttatatcggatgcctgagcaaagaattctcatttctgacgccacattataatattgattacaatggatggcatattgatggaaccattatggaatgggactatagcattcttgatcgaagcggttattcaattgcacgggttagtaaagaattgtttcatatgactgatacatatgttattgatgtgcaggatccaggaaatgcattggatgcgctgatgtttgtactggcaatcgatgcagaaaaatgttccagaaattaaatagttgatcttgttattgtaattattcggaggatgaagcatgggattattcaaaaagaaaatcgtgaaaaaaacatatgaccgagaacatatgaaaccagttattcgtgcaagcatttgtaccggggaagaagttgaaaaagaatattagacatcttctgggtcgtggatgaacgccaggtattcgtctgtaagcttatagggaaaaaggagttattttataaaggtgatgaaaattacttacattaaccacagtggatttttaattgaaactaaagattgctactatatttttgactattataagggtgaattaccacttcttgacaagaaaaaagaagtaattgttttttgcagtcattttcatgaggatcattttaatcctgtgatttttgagatccttgatgatatgagcatgacatatcaggcaattttggcgaaagatatacgcaaaagaaaacatttgtcagatatgaagatcacatatgtttatcatgatcagacttataatctggataatggcacccaagtcgatacattgctatctaacgatagtggtgtagcatttattgtcaaaacaaaggaaggcaccatttatcatgctggtgacttaaatgactggtattgggatggtgagccaaaagctgataaccagagacttacttcagcatatcgtgcggagatcaggaaaatcaagggtatgcattttgatgctgcatttgtccctttagatccgagacagggaaatcactatgccgacgggatcctgtatttccttaaaaatgtagattgcaatgtcatttttccaatgcattactggaatgatgccaatgtaattaagcggtttattacggaatatccgcaatataaatcacgtattaaaaacacagaatgtgcaaaaggagaagaattatgaagtttaagatgattcacgaaaactacaatgtatcagacctggaccgatctattaaattttacaacgaggcccttgatctgcacgaagtgagaagaaagactaccgatgattttatcattgtgtatttgagcaatgatgtaagtgattttgagttggaacttacctggcttaaagatcatccacagccatataatctgggtgaatgcgaattccacctggcattccaggcagaggattacgaggcagcgcataagaagcatgaagagatgggatgcatttgtttcgaaaatgaagcaatgggaatctatttcattgtagatccagatggatactggcttgagatactgccgtaaagctagagtatattgggaattttaaatgtttagatgtatgtgaaatacatataggcgataatgtgatgattggtccaaatgttacattggcaactcctatgcatccattattacctgaagaacgcaatatcaggatgagagaagatggcagtttttataatcttgaatatgcgaaaccaataactataaaagataattgctggctggcatctaatgtggttgtttgtggtggtgtcaccataggagaagggtgtgtaattggtgcagggagtgttgtaacaaaagatattccgccgtatagtttggcagttggaaatccatgccgggtcattcgaaaaataactgagaaagatcatatgccagatggaattgaaaagaattgaaaaatttgcagagatgacaagaggttcattttagtaaaaaaaataaaataatcacaattaataacgccgatgcaggatttttataatcctataccggcgtttgttgtttacgtgagaatgtattttatgcttattaaccatacagacgataggaaagtgtgtgggatttcgcctgtgtcatgacacaggcagtgcttgctattcttgattagttaaaggtttttaactttcccgattttaaaataataccgatcaataatatcctgcaatgtaatggatttcattttttcatctatcatattttgaatttcatgatagaagtccccaatagcgaattgaatgttgataccgattccacaatccggattggtatctgtgtccaggtgaagcagcggcttatcgccctctacggctcggtagatgtcatacatattgattttatctgccgattttgcaagagcggcattcgcatgaccttgtgtgttgacaacaatgcctgcatttttcagggttgccataagctgtctgacataagccgggtttgtcttgatactttctgcaatttttgtgctggagagttgttcgtcatctccaagagcaataaatataagaatatgaatggtgtcactaagctttgtggaatatttcatttgtcacctcgaatttttctcttgcaatttttaaacttacatgataatatgcttttaatacttgatgtaaatttaattttaacaagtaaaaaaataaaagtcaagcaaaataaaaagtgtggaatctgatataaaaaagcttctgccaagatgtaatgagtgcgggagaattatggtttcctgggtaagggatgatacatttttggaggggaaagactggagggaaggtgtaaggcgatatgaggatttcctaaaaaatatctcatgaatggaacagataagaatgttgtactgctggagctgggggttggtgagatgacacccagtattattaaacttcctttttgggaaatgacatacaaaaatgaaaaggtgttttatgcctgtctgaatcagaagaaatcctcagctccagagcatataaaagacaaaggcatttatatagcaggagatttggtagaaaccctgcgggatttaaaagaaaacataacgggaaaggaaatgtgatgaagatgaatgtatatcaagagataagtcaaatcatcaaagaagcagatggtattttgattggagccagtaatggtttgtctatcgcagagggatataatatttttgcagatgacgcatggtttcaggaaaatatgggagatttcagagaaaaatacggactgcgttgtgttttacacggattttcagtgccaatgaatgtagaagaaaagtgggcgtttgtaagcagacttgttaaggcaaaagctatgcaggatgagccgagtgagattatgaaaaacatctatgcactagtaaaggataaagaatatttcgtagtaacttccaatgcggaggatcattttgtgccggcaggttttgaggtagaccgtgtttttgaaatggaagggaaattaacccagatgcggtgcaagaacagatgtcatgacgaggtctatcctaatcaaaaagcagttctcgccatgacagaagaggaggtaaacggaagagtacccaaagagttactgccgaaatgtccaaaatgcggtggagatatggaagtaaattggggtgagatgtcctcgtttacagaaacgaaaaattggaaggaaaaggctgcccgctatcaagaatttattcagaatttacatggaaagaagctggtaattctggaatttggcattggttggagaaatcagatgattaaagctcctttgatgcagcttgcagcagtagaaccacaggcaagatatatcacatttaacaagggcgaaatttacattccagaggaaatcaaagaaaaatccatcggtgtggatggtaatctaacggaagagttaaaggaaatcagaaagggaaggatagactaagtaagatggttaaagatattacagttgtgagataggagaatgaaaaaaatgagctgttatgaaaatttggtaatgaaaacacaaatgaactattccagacactacagtacctatgcatccggcggtactgctgtagtgttgagcaaacaaaaaccactttcttatgaggaacagattcaggaatttgttcgcagagtgcaggaggcagagtgtatcatagtaggcggagcatccggtttatcagcggctggaggtggtgacttttattatggtgataccccttcttttcgtgagcattttggaaaatttgcagataagtatggattcaaaggtgcctttagcggaatgatgcatcggttttctacaagaaatgaacactggggatatgtggcaacctttttaagtactacacaaaatgctcctatcagagagccatatctggatttggatagaattttgcagggaaaggattttcatatcttaacgactaatcaggatacacagtttgtaaagatttatccggaagaaaaggtcagtgagattcagggagatcatcgtttcttccagtgttcccagtgttgtcaggatgaaacatgggatgccgtacaacctgtggcagatatgattgcggctatgggagaggggacaatggtaccggatgaactgattcctcgctgccctcattgtggtgcggaaatgtttccgtgggtaagaggatatgggaattttctgcaagggaaaaaatatgaagaagaatatgagaaaatctcaaaatacattcaaaagaacaaagatagaaaaatcctcttgatagaacttggagtagggcgcatgacaccgatgtttatacaggaaccgttttgggaactgacaaacagcttgaaagatgcatattatatctccgtaaattcagaatatcagtttttgccggaattcattgaagataagggaattgctattttgggagatataggaacagtgttaaaagatttgcggaaagcaaaagaggaaggtgcatttgtataggatacttgttcttgatattttacttgatggagaaacattagaatattgattgatacaaaactgcactcagggatattgtgggtgcagttttgcattaaaattattgattacggtacagtttctgatatgcagtaggtaatatctgaaatatatctcggaaagccgatgtaaatttactttggcttttttttggagcagtaggaatgaaaatataaagagaaagaagggtaagctgtctgtgtatcaggcagcttatatatcaatgtcgatctattcaccgctctatataacgaaacgctcagaggctgttttacagtgggggaaaagaaaaaataaaaattttttttacattaacgtgaaaaatatagacgtgaaaaaataaaatgctataattaaaagaattgagacaaagttaactacaatcagagaagaaaatgatgcacagttggctctgacaccatattattattatacttcttctatttacaaaggagaatgcaccagcagccgggtcggtctgatgacagcgaagaattcagataccccattatatcttgtaaagatcaacggtgagcaggtttatgaactcgttaaaaaatatcttacagaggctgatgagaatttttatgtaaccacaaaatacgagttgccgattgcatctggtatgaaaataattgtcaaaaacgaagaaaacggattctcattaaaggatataacaataaatgataaaaaaatagacacagaaaaagaatattccattcttcttacggatacgacaaaatctattttgaaaaaaattaatccaaaatgtgctattgagcaaataggggatacaacattatctagtgcatggattgcggccatgtcaaatgggcagcaaccgtcagcaccagaagactatatagaggttgaaaaataaagtgcaaatagaacaagagataattaagagaaaaaaataataatgtcattgtttgtcataatttttattctttcaagttttgtttttgtaaagtttctgttgaataggatgaatacatatattgaggtaaatggagaaatcagtatggaatctgttgtcgaacagattcaacagacctatgatatgcaagtgagtggatactatagacagttacattttgttgaggactatctgtgtaaagagaagaaaatatcccttgaagcagataataaccgaaacttttttaaggcatgggaaaaagaatctgagagtacacttttatttctacaggaaaatggaaaagctataacctcagatggaacaaaactgaaagttgatatgcctagtaagcttttgctgaatttgagaaacggatttaacattgaaaaattggtcgcttttgaatttgaacaagtgaaaaaagacggttatttggtagcaattccatgtcaggaatatacgattaatggggaaacttatacagcgattggaacagtgtatgatcattcgaaattagactccatgttaaatcttggaggatatgatggaagtgcatatctcttcatgttggatgatgatggaaatattacttatacgaaccagaaggatgacattttttttcgaaattattcattactgaaacatctgaaaagtaatcatgctataacagaaaaagagtttgattctctgaataaaaagattgcggaaggaaaaaagggagtagaacttttgaagaaagataagccttattatttgggatattgtccgatagaaagcaacaatacgatgttgatttatattgtaaaaaagaggcagtagataatgtgttgaaagaataccagaaaacgataggctttattacaatgatcatgacaggatttatactcttgctttttgctggattattctacagtatttccagattcagtattgcaaatcaaaaagttaaatttgaaaaaagaaacaatgagcttcaggcaatgattataagcgaaatggaagaagctaataaaaatctgaaaaaggctaagaacattgctattgaggctctacagaccgctgaaaatgcaaataaggcaaaaacagattttttatccaatatgtcgcatgatattcgcacacctatgaacgcaatcattggtattatatcattaatcagacataatgccggcgacaaagaaaaagttatagagtatgcagataaaatagctatttcttctcagcatctattaggaattattaatgatgttttggatatgagcaagattgaagctggaaaaacagttttcaaatattctgatttttctattctggattttatagaagaactcaatacaatatttcattcacaggcaaacgaaaaaaatcagagttttataatcaaaaaggaaaaccttaaacatgagtgggtaaatggcgacaaggttcatctgatgcagattttcagtaatctgttgtctaatgcaataaagtacacacaggaaggtggaataatccagtttatagcagaagaaagtgagacaaactcttctacatatggaaaatatcattttatagtcagtgacaatggtatgggaatgtctgctgattttaaagaaactatctttgatgcatttactcgtgcagaaagttccgtaacaaacaaaatacagggaactggtctgggaatggcaatcactaaaaatctggttgaatcgatggggggaacgattgaggttgaaagcgaaccgaatcgaggaagtcgttttgaagtaatcttaaatctaaaaattgtggagaacagagtagtttcttcgacagaacagatagaaatgcatgagacagatagtgatattctggatggaatgcgtttcctttgtgcagaggataatgagttgaatgcagaaatcctaatggaattattaaagtttgaaggtgcagagtgtactatttgtgaaaatggcaaaaggattttggaagcatttgaacagtccgtgcccggtgagtatgatatgatcttgatggatgtgcaaatgcctgttatgaatggttatgaggcaacggaggcaatccgtagaagttcacatgaacaggcaaagacgatcccgattattgccatgactgccaatgcattttcagaggatatgcagcactctctcgctgctggaatgaatgctcatatttcaaaaccagttgatatgaagttgctgaagaaaaccataagaaatataaaacttgggagggaggaagccaaatttattgatcaataatcactaaagagaaatgcagtcatgtggcataggtaacagagcaatttctttttaccaaagagaagggttcattattcaatgtgaaggtttggatgaagcaatctccccatctttattcaatcttaatacgtcgtaaatgtctcttatacgttcttaaaatctacggctgtataattataatattaatgctgataaggagttgcctttatgccaggagagaacattcgccgaaagcgccgtctttcgtcttttcaaattatcatattgggttttgccggagtcattctgctaggtgcgctattgctgatgctgccgatctccacaacagccgggggcgtaacgccgtttaacgaaacgctgtttactgcgacctctgccgtatgtgtgacggggcttgtggtgcaggatacaggcagttattggtcagcctttgggcaagcggtcattctgacgctgattcagattggaggacttggcgttgtgaccgtcgcagcgtcgttagcgcttttgtccgggcgaaaaatatcgttgatgcagcgcagcaccatgcaggacgcaatttcagcacctcaggtcggcggaatcgttcgtctgacacgcttcatcctgcgagggacgtttctgattgagctgctgggggcgcttgccatgctgccggtgttctgccgggactatggatggcggggcatctggatggcattgtttcattccatatctgctttttgcaacgccgggtttgatattcttgggacagaggataatctctatccatcccttaccggttatgctggcagtccggtaatcaatatcacgattatgctgctgatcgtaattggcggcattggatttctgacgtggaatgacatctgcgaaaacaagtggcggtttcatcgctaccggatgcagagcaaggtgattctcgtcacgacaggtcttttaattcttctgcctgctgtgtttttcttcttctcagacttttctgcgcttcccgccggaaaccggttgctggcatccttttttcagtccgtcacgccgaggacagcgggcttcaacacggtaaatctatccgcgatgtccagcgcatcgcagggcgtgatgatccttttgatgctcattggcggttctccgggttctacggcgggcggtgtgaaaacaacaacgctggcggttctgcttgccaatgctgttgcgactttccgtcagcgcgatagtgcccaattttttggacgcagagtcgattgcagcgccgttaaaaccgccgcgaccattctgatgatgtaccttgtgctgttttttggcggcgctgtttttatcagcgcttatgaaaacttgtcgctttccacatgcctgtatgaaacagcttcggcggttggaacggtgggattgacacttggcattacaccgcagctgcatattacgtcgcaaatggtgctgatcacgctcatgtatctgggcagagtcggcggtcttacacttatttatgcggcattttccggaaaaaaagcaaccggtgcaaagatgccgaaggaaaaaattatgattggataaggagtcttttctcatgaaaaacattctattaattggcgcaggccgttttggacggcatatcgcagcacagctttttcagctgggtcatcaggtcatggcggttgatacaaacgaggaacgaatcaatgatgtgctgccttacgtcacaaacgcgcaaattggtgatagtacaaacgcggagtttcttcactctcttggcattggaaattttgatgtctgtctcgtgaccattggcggcagttttcagaactcgttggaaacgacgtcgctgttgaaggagctaggcgcgaagtgcgtggtgtcgcgtgccgaacgggatgtgcaggcgaagtttctgcttcgcaacggtgctgaccatatagtctacccggaaaagcaagtggcaaagtgggctgcgatccgatacagctccaatcatatctttgactacgtagaaattgatgaccagcatgccatttttgaagtagaaattccggaagggtggattggcaaaagcgttggagagctggatattcgcagaaagtatggtattaacattctcggcattaagcgttcgggaaaaacagacgtttcgattacaccggatacggtgctgtctggggaaacaacgattttagcgttgggcgaatataagacgctgcaaaagtgtttccggatatgaacgggcagtaaatccgattggacgcggtagaaaccgtcacatattggtgctataatattattttaagaggggtggtgaaagtgtgcagaacaaaggaagtgaaatgtcaaaagagcatattctggtgtgcctgtcctcgtctccatccaatgaacgcattgtacgaatggcagaaaaaatggcgcaggcattttgcggaagccttaccgcactctatgtgcagacacccggagacgctgatatgaacgcggaagataccgttcgattgcaggcgaatatgcgtctggcgcagcaacttggtgcagaaatcgtcacaacacacggagaagatgtaccgacgcagattgcggaatatgcgcggctctccgacgtgaccaaaatcgtaatcgggcgaagcggtgtgaagcggcggcatttctggagcgaaccgatgctgacagaacggctcatcgcactggctccggaggtagacattcacattattccagatgcggaagtctacaaaagctatcgcaggaaccggctgatcgctatttgcccggcgcttccgaccgcctgggaactgcttctgactgtcgggattctggcggttgcaacgatcattggatgggtctttctgcgtctcggctttgcagatgccaatatcattatggtttacctactgggtgtgcttctgacctccgcctttaccagcgggtatacctgcggtgtgctgtccgcttttttgagcgtcatcctgttcaattattttctgacggaacccagactgtccttggttgcctatggcagcaaatatcccataacctttgcagtcatgtttgcagcggcgcttttgaccggcacacttgctgcaaagcttaaagtccatgcacagctatccgcacgggatgcttatcgcacgaagctcttttttgatatgaacaggcagcttcaaaaggcagaaacgccggaggaagtctatcggatgaccgcaatgcagatacaaaagctcatgcagcgggacgttctgatttgcccagcacagggtggtgctttgttggatgaaattatttacccggttgacgggcgtagcccatacagcatctcagatgcggatggggagcaaaacgtgattcaatgggtctggcaaaaccgcaagcgtgccggcgcaacgacgcataactttccaaaggcaaaatggctgtatcttgccattcgtaccgggcagcaggtttttggtgttgtcgggattctgatggataagcaaacgcagcctgacgcatttacatctagcgttctgttctccattctcggagagtgcgctctggcgctggaaagcctgcacaatgccgcagaaaaggaaaaagctgctgttcttgcaaagaacgaacagcttcgtgccaatcttcttcgttcgatttctcatgatctcagaaccccgttgacctccatttccggtaatgcagatacgctgctgcacagctataatgcgctggatgagcaaacacggaaacagatttttacggatatctatgatgatgcgcaatggttgactggtctggttgagaatttactttctattacgaaaatctcggacggcagcgtaaagctgcgcctttctgatcaggtcgtggatgacattgtatcggaagcactccggcatatcgaccgaagatcgacagaacatcacatcgaggtggattgcggagacgtaccgttgctggtgcgggtggacgcaggacttatcgtgcaggtgcttatcaatctggtgaacaacgcagtcaaatatactccgactggatcgaacatccggattacggcaatcccgcgagaaaatatggctgagatatgcgtcagcgataacggtcccggtatctcagatgaactaaaagaacgtgtttttgaaatgttctttaccgggagtaatccaattggcgacagccgccgaagtcttgggcttggacttactctctgtcaaaccattattcatgcacataatggcgaaatgacgctgaaagacaattcgccgcatggatgcatcttttcctttacggtaccacttagtgaggtgaacttaaatgaataagccgcttgttcttgttgtagaagatgatactccggtgcgcaatttaatcacgacgacgctgaaaactcacgaatacagatatctctcggctcaaaacggcgcaagcgccgtgctggaggcactgtcgcataatccggatattgtgctgctcgatctgggactcccggatatggacggtgtggagatcatccgaaaaatccgttcgtggtcgaatatgccgatcattgtgatcagcgccagaacggaggattctgataaaatcggggcgttggatgccggggcagacgattatctgacgaaacccttttctgtggatgagctactggcgcggctacgggtgacgcagcgaagattagcgttgatgaaagcggatacggcgcaggaaactccgatttttacgaatggtgcgctgaaaatcgactatgcggcaggctgctcatatattgatggtgcagaactgcacttgacgcccatcgaatacaagttgctgtgcctgctctcaaaaaatgtgggtaaggttctgacacacacctacattacgcagcagatttggggcagcagttgggaaaatgatattgcttctctgcgagtattcatggcaaccctgcgcaaaaagctggaaaacgggaaagatgggcagcaatacatacaaacgcacatcggcatcggttatcggatgcttcgggttgagtgaacaattcctgagctcaaaattcagtactgaattttgaactcaggaattgttgatttggcactacctttcatttgcatggaatgaccacaccatgcaaatgagctgaccatcgtgatatcaaaggaagcgagccgggctttgatatcacgatggtcagctctgttttttgcgatttttattatcttgagaatttatcactgtaacgaatatgcatatcttcccaatccatgatcaagcacagaaaggtaggatccgtcagcttttcgaagatggaagtgaatatagtcattttcattaccattgtcaatctgttcccagatacttgattctatctgttgctgttcatcttcccgaatcaagtttcgaaaacttttcttagtaaatttgaatagttcatctatatctttatatccagccatatgaaaaaattcatcatttgcataaaatagttcatcatcttctttgtcagctttgtatatgataaatgcacctggaagatgttccgagatatccttgaatgcgaatccaagctgtttgcgaacacctgaccgaagaccttctctgtaggccatacatccgtttttaccatgaagctttatttcataaagagctgcgtctgcgcagcgcatgagctgtgaacggtcggatgcaaatgttggatattctgcatatccaagagaaatataaaatgcatgttccttaccctgatatgagaatgttttggaaagtttagtgaattgctgtagctgtacatctgcttctgcaaaggtacaatttggtaaaagaatgcagaattcatcaccaccgtttcttcccagtaatgcatcggatggaaaaaaagccttcatgctgtctgcaagactctttaatgccctgtctccataactatgtccatagatatcattaataaacttgaaatcatcgatatcaaggagggcagccacaaaatgtgtttgaggatttttagaaatcattttttctgctaactcatcaaatccatagcggttataaattcctgtaagagaatctgtatgagccattatttgatatttgttcttgagttcttttgctactagccatactctggtaagaattgacagaagaaggcttattgtaagaaacagtccgatgatgattatcagtagtgatttatttctccatccacttttaggagttatttcaaatttccatttttcatctcctattgtaaatgtataagaaacaggatgatttgtttcaccatctgattgataaaccactttataagtatcactccatggagcgtccgtttttaaaattttatagtcgtatccaaaatttgaaagtgcaaggaatgagtctgaaaaaatgtccggaacacgcaggataacgatagtaaatccccagaaatactcttgctcggttttatctttcaggtagactggattgcgtaccgcaattccatagctaccctgtttcaattcgaaaggaccttgcgtaatgattgtatggttgtctctggcgtaacaggaaatctttccgcggtctttatcatggattaaatcgatcttacctgcctcatttccatcagccggataaatatctgttacaacaccattaggagcaagctgtatgcattcaatagaatcagacataagattcccggcaatcgtttcaaactgatgaatctcaccattttcactgattagaatctgttccaaggtatccgtgatctcaattccatttgtaatttcattctttatgcgttcgccataggtggctacgtttaattgtgctgttatgtgtctctgctctttttcgtgggtgtctgttatgtatacaattaaaccaacaaggcatacgcccagtaaaaaaatgataagaggcacaagtgttttctttttcacttagttcacctcgttttatccatgggaatttgtaactgttcagagccaagcaaaatttcaaaaaacaggtataaaatgcttgcatttttaagactgtttttgaaatnnnnnnnnnnnnnnnnnnnnnnnnnnnnnnnnnnnnnnnnnnnnnnnnnnnnnnnnnnnnnnnnnnnnnnnnnnnnnnnnnnnnnnnnnnnnnnnnnnnnnnnnnnnnnnnnggaatttttataataaagcattatatcacagaagttgaaaaacagaataagttttctgaaaaaaagacaatatggtttttacgttaaagcgataatgtttttgtttttccagagtcagatgagcaaatgtttgattattatgagagtatattgctgaaagttatgattgtcagtcgattactaacacaagtgctagtgcaattctttagtgtttcatttaaaataaataacgggtaattttgatattttttggtgttagcaaccacgaaaagaaataagaaatggaggaatgaagatgagaaagaaaagatggatgagtatcatgcttgtgctttgtatgatattgacgttattgccaatcaatacagcttatgcagatgaagccgatactcaaaaagatgccaatcaagttgaagaagttcaatcagatgaagacattgtaatgcagaccgagcaggtagaagaagtgaagccagatgaaagtgttgcaatgcaggccgagcaggtagaagaggttgaaccggatgaaagcgttgcaatgcaggatgaacaggtagaagaagcgaagccagatgaaagtgttgcaatgcaggatgaacaggtagaagaagctgaatcagatgaagatgctgtaatggaggaaacagtaaaacctgcagttaggatgttagcaccagcggcagtctctccagcggcttcgcctgaaaaaattaaagagatagagctgaatttgaagccagtaactgaaatcacaaatattaatgactttaaatcaattacgtattctccatcagacaaaatacatttggaagaagttactgtatataacgggtacaatagcacaagtggttcaattgcttccgtatatactcctgataagggctatacagttgtatatgaatttacgtgcgataagaacgcgtatgaacttagaccttcttatagtaaagtaaaaataaattccaagtatatacagaactgggattgggagtgtaagttctcctgggggtctactctaaaggtttatgtgttttatccaagtctgaaaaataaagttggtgtaacttttaagccaagagaccaatggagtggtaatatttccagcatgtatgttggtcatgatctgggtgatgcctattctgttgttcttgattattacagtgggttaaatcaaattagtaacgacattggtagtgatacagcatatgattcaacaaaagattatagtgtacgtattaccattgctgggaaacgtcatgctgctaccatttcacctgatttaacaaaggatgatgtcacaattaattatggcactatctggaaaattaccagagatgatactactggttatacaagaatctatgtgaacttcccaaaagaagacagtaacacagaatatacagtcaaagctaaaaatgctgaaataatgaatgaagcaggggaacctgtttctaaagcaaaagcagggactgtccttaccgtgaagctcaaggatcttgagaaaggatacgcttttgagaaatgggcagttgatgataatagtacagatgtggagtttcagaatgtgaagagtacgacaacaacatttgttatgccaaaaggagaagtttacatttctccagctactcttcggatagctaatgtgtattctaaaaagttgacttataacggagaagaacaaactggggtatatttacatgatgtgtatggcggcggttcatctatcggaacacttaccggacataaagcgacagaagcaggtacctacactgccagggctagtttaaataaaggctatatttggtctgatggcactacagaagacaagaatattgtatggacgattgataaagctgaccgagatggaccaagaggattgcgcagctatatgccaacgaaggaaggagccaacgatggcggtatattagcaacaacaacggaaatggaataccgaaaagtcggaacaacaacatggaaagactgcccggataaagaggttaccgggttatccacgggagactatgaagtaagatataaagacaccaaatcttacaatagaagtatagccataatctatactgttccaatatggggaccaaagacatggataacatggattgaaaatggaacaccagatggaatacagttaccaaaaaatgctacgattaccattactgcaaacccacctgaaaaaggcaaagaatttgacaagtgggttcccaatgcatcaagtaatgtaaagttcgaggatgaaaagagcgaagttacaaaaatgacggtattaggaggaaacgtaactgttagagctacatacaaagataaagaaacaccgggggctttgaaatacgatctaaacgtaattaatggtcagggtactggaaaatatgcaattaataaaacagtagaaatcactgcaaatccagctccagaaggtaaagagtttgataaatgggttgtagtagaagatacggtagcggtagcagatataacaaaaccgaaaactacccttacaacaaaaggtgttgatgcatgggttgtagctacatataaagatattggatccgttgctgtcgatcatacattaacagtcgtaaacggaagcatttatagcagctctaatccgggaaaattcaagcgaaatgaagcagtaacactctattctaaagaaatcaaaaactttgataaatgggttgtgacatcaggatcggttgtggctatacttccaaatgaaaatacgcttaatgtaactatcataacatccgacgaagatacgacgattgaagcaactcgtaagagtgatgcatcagtacatacacatacatatggagtatggagcaatgatgatgcagatcactggcatgaatgcacagatgctgcttgtacagataaggcaggaagtgtaaaagacaaagcaggtcatgtatatgacgatgatgcagacacaacttgtaatgtatgcggatatgttcgtacagttacaccaccggctccggtacatacacacacatatggagcatggagcaatgatgatacagatcactggcatgaatgcacagatgcttcttgtacagatagggcaggaagtataaaagacaaagcaggtcatgtatatgatgatgcagcagacacaacctgtaatgtatgtggatacgttcgtacagttacaccaccggctccggtacatacacacacatatggagcatggagcaatgatgatacagatcactggcatgaatgcacagatgcttcttgtacagataaggcaggaagtgtaaaagacaaagcagctcatgtatatgatgatgatgtagacacaacctgtaatgtatgcggatacattcgaacagtaacgccaccgactataacaccggattacaagttcctggaaggagcaaatggtaagtggacaaagagcagtgataagaatcttgctttccgtgcaaatggtgaattctctaaatttacaggagtaaaggttgatggaacgaagattgatgctgataagtatacagcagtttcaggttccacaatagtaaatttaaagaaagagtatcttgaaacattatctgttggtaaacatacattgactgttgtgtatacagatggtgaatgcagtactgaatttgaaattaaagctgcaagtactgcaaagaaggatactactgataaggagaataaatcatctaaaacgactgcagccaaactagataatgcaaaaacaccgaaaacaggagacaacagtaatatattactttggtttacactgttatttagcagtggtgtggtgttaatgggaaaagcatttgcaaacaaaaagagaaaacaggatagataggattttcttcatagtcacaagaactgcctcttggccaaaatggtcaagaggcagttcttttaatctatagttttcttattgtagaataatcttacggataggctgtgtttcttcttcggaaagtgtcagacaactgttgccgatgaagtaatgaaaaatagtgaaaaaatagtgaaaaaatagtgaaaaaatagtgtaattttactgtttttctccggcaatcgccagatattcataggttggacggaaatcggtgttgtcgcattgctggcaatattgcatgaaaatgcgatccataatatgcggtatttctgtctcagtcggttcaaacaggatgatcagatactgcatggaactgtaacgggtacagatatccacacggcgaatcttctggcggatagccttttctatacattccagagcctgttcaatggcttctatattcggaatcgtgtcgacagctgtttccatggtgaccatcacaagataacaatgacattggctgcgaatactgagctgactcatatactcatattgacgggcaaagtcacggtaattcagatccatggcaccgatgtaggtgccgctttcccgcagggatttggctacgagctgaagatctttgccagtactggaggtaagaagttctttacggtcaatctgctgatagaagaagaactgatttttaccgttctgtttgacataatataaagctttatccgctttctggtaacagttttcaaagttatcaccggctgtgcacatacagattccggcggaaagcgtagcacttctgatttcgacatctttggaaatggccaaacggaactgatcgaagagttcctgcatttgtgttgtgacagaatcatgagttgcttccggcaaaaacagcagaaattcgtcgccgcccaatcgacaggcgacgccctcatcggagtagcgtgacaatagactgcccaatagtttcagtgcccggtctccggctttgtgtccgtggatatcattgatctttttcagattatccatatcaaggaaaatgaggtatccgtcggattgctgcatcagctccgccgtcaggcgctcaccgagatttcgcatcggaagtgtggtgagcaggtcgtagttcttggcatattcctgtgccttaattgtgatcactacatccgagatgaatttgctgatggttcgatggtcatccgcaagattagaagtactgctgctttctgaaaagtcatccagatcaggaatctgattttcggtgagcaatgtcagaaatatatctgcaatttcagggtcgaattgtgtgcccttgtttttgagaatctcttcatagatttcatcctgagacagagcattacggtaaatgcggcgggaattcatggcatcgtaacaatcagcaacagcgataatacgggcataaatcggaatttcagtgcctgcaagaccgtcaggataaccgcttccgtcatagtgttcatggtgatttcttgtcacttcgacaacatgcgggatcagcgtgacatctttgaggatttcggcaccgataattgtatgttttttcagaagattatcttcatcctctgtcagttgggtcggtttgtttaaaacagaatccgggataccgattttgccgatgtcatgcagatgtgcggcatgtttcaggttgatgatttcatcctgtgaccagccgagttctttggcaattaatgcggcatattccgccacacggtaagaatgaccgcgggtgtattcgtctttggcctcaattgttgttgcaagggtctgcatcatctgcagagatatgcgttctgtttgctgtttgcttttttcaacttcaattttctgacggtgcaattccatatcctgaaggtttctgagggttcggatgatattgacaaaaagcaggatgatcatgccgatgccgataaacaatccggatatgctggtaacgaaataaacagaaatcgcttctatagagatacatatgatggctgccaacagccccagaagaagaagccggtctgatttgcggcggctgctgtgcatataaataaacaaatggataaatacaacgacaagtatcgaacaaaggatgatttgtccgattggaagcgtttcaatatagtctgcaatgccgaaaaatgtcagaatagaacagacagcgaaatccaaaagcgccagccccccgaggatggtatacaatctgcgatgaagctgcttctggatactgtctgcatagagcagaatcggaatcggacacagaagaatcatgacaaagcagagcgaacccagagcggaggcatttggaactaatatctgccgcagtttggattctcccatcatccagacaccgcccattatcatacaccagccaaggtattccatatcaaaactggaatgatagatcatgccgagtgccaggctgaaaaggatcgttaccagaccggtaaaaaagatgaaaatggcaatataagttgcaggtccgtattgattcaaaatagtgagccagatatctgttttgtcaccgcagagaaccgtattgacaacaccggaataattataagtatgggttgtcagctcgatgcggagttctttgccggcatcggcctccgaagtctcacagaaaatataacggctggcagagtttttgccggccagtcgtgtctcgctggtgttgtaagaagcgcgcagtgtgccattgatatagaatttgacatcctgaagggaggaacgaatggccatggtattctcgtgatagtcttccggaagacgtgtggtaagtaccattgtctcacccacaggcagatcatatcgccctgggacagtaatttcttcagatgttccatcagacttctcccaggtaaaagtaccggtgtagatcatggaatctgaattaacattcagtcggcgttcatcggcaccgaaaaactgcatgtaagtaaaccagccgagaatggcaaacattaaaatatagaaaaaatccgggatacccgggcggcatccgggggattttggtgggacataatcaactctccttatgttaagaacaaaatacggcaaaaagtgctttttatatcatagcatttattcagagttttgtacattgtttgtgatttatattcagttaaatggcggacagcccactgtatcgattatttatccagtttctctttttcaatattcagcatatcaatattgatgttgttttcgctggcggttttgttaacccatagattcagcgcatcaatggctacagacactttgtccagcttgtggctgataaatgcaaaatctttaatttcatcatctgtgatctttccgtcgcgggcaatctggatcagacggcctgtgagtggattgatctcatccagactggctattgtttccaaaatgatgcttgaaagttcggacatttcgatttcaggtacatagcgatagccaatttcacatttgtgggaacaataataattgcagagatccggtcgtttataacagtcagccatctgaacaatgtcataaggtgtcggatcctgaagattgtattcgattttttcaattcgtgaagcagaaacaccggtcatcatttcactggccttttctcttgtcagttcacattcttcacggcagatctggtagatgtttttgtttgctcttgtcgattgtcttcccattgtaaaatccctctttatggtttatactccaaaacggagaaataaacagtgttatttctatatgttcaaagtttatttttagtgctctctctattataatagaagcatagcattacagcaacggctaatttatctgtgccggttatttgaaataagtgaaaatttcaaaatcgttattatgagagatagaaggggagaagaatatgttaacgttgttatttattatttgtttttttgcggtttttggaaaactgttgatgtttggtattaaagctgcctggggaatttcaaaattcctgctgacgattgtcctgcttccggttattctgatcggattggttgtgggcggtctgatctatctggcattcccgattctaatcgttgtgggaattgtcggattgctgctgtaatgcagtaatcataaaatcatgcagggaaaagcagaaagagagaaagaaaatggcagaagtgaaagacaagcagaagctggctcggccggttttattgagaccgcatcatggtatgtgccttgcttattttaaaggtgaaggttacagtgatggtttttcggcgcatatgaaagaagtattggatgaattgcagaaagggatggatgtacagctgtatgtagggacagatgaaatctgttctgcctgtccgaataatcgggaggggcagtgtacagatctgactttggtcgagaaatatgacaacgctgtgctggaggcctgcggtctggcagatggtgagcagttagccttcgatgattttactgaaaaagtgcagaatcaacttttggtgacagggaagaggaaagaaatctgcggaggctgtaaatggaatggtatctgtgagaatgaaaaaagccgatgggaggaataatagatgtatacagcataatagataaaaccagggttacattattgataattatatgctataatgcgtaaaagacagacgaaatgactgccgggagaacggtactctattcgaatgtcacaacagaaaaagaattcaagacaattgaatataagcatactctgacggcaaggaatatccgagcaggaatagtaaactggaaattatcgggaagatagtttatcttctcgtatacataattagaagctcccttaccgtcagataaaggagttttttctttgttgaataaaatacgaaattattattatatatagaaccttggaacaatgtatctgatacatcgttcaaggccatatggaggtttatatgctgaaggtagcagtttatggtaagggcggcattggcaagtcaacgattacttccaatctggcagcagcttttgcggccatggggaagaaggttattcagatcggatgtgatccgaaggcagattcaacgatcaatctgcttgggggtgaaccgcttcgaccagtgatgaattttatgagagaagaagacgaagagccggagcgacttgaggatatttcaaaggaagggttcggcggtgtgctttgtattgagactggcggcccgacaccgggacttggctgtgcaggaagaggcattattgcaacatttcagttgttggaagatctgaagttatttgagacgtacaagccggatgtggtgttgtacgatgtgctgggtgatgttgtctgcggtggatttgccgcaccgatccgtgagggctatgcggagaaggtactgattgttacatccggtgagaagatggctctttatgcagccaataatatttcaagcgctgtgagaaattttgaagatcgcagctatgcccgtattttcggaattgtactgaaccatcgcaatgtggagaatgagacagagaaggtgcaggcctttgcagagaagagtcatattccgattgtgggagagattccgagaagtgatgagatcatccgctatgaagatcagggcaagactgtcatcgaaggcaacagagattccgagatcagtcagagattctttgatctggccaatctgcttctggaagatgaggcgaagaaagcccaggacggcgaataaatccggaggaggaaatttattatgatgcaggatgcatttttttgtacagtcggtgagctggcggcaatgggaagagagaatatcccgccgcagtttatttccggcgcacatttaatatacagttctccagctacgctggcctttaattcaccgggtgcggaaggttttggcgtcaagcgtgcagggctggcaatccctgattctattatgctgattgtggcaccgggatgctgcggcagaaatacatcattgatcagttctatgagagaatatgatcagcggttcttttatctgatgatggacgagacggatattgttacggggcgtcatttgaagaagataccgaaggcagtgaaagagatctgtgacagccttgagaagaagccgtcagttgtgatgatctgcattacctgtgtggatgcacttttgggaacagacatggagagagtctgtcgaaaagccgaggaggcggcaggtcttcctgtgagaccatgttatatgtatgcgttgacccgtgaaggcagaaagccgccgatggtacatgttcgccagtctttgtattctctgcttgaaccgcgtaagaaaaaggggaatgtagtgaatctgctgggctttttttcaccccttgtggatgattgtgagctatatgatctgctgcatcaggcaggcgtgaagaccattcatgagatttctgcatgcagggattatgaggaatatcagaccatgtcggaagctaatttcaatctggtgctgcatccggaggcgagatttgcggcggaagattttcatgacagattgaagattccttttatcgaactgacccgattgtatcagattgacaagatcggcagccagtacagagccttcggcaaggtgctgggtgtgacttttgatgatcaggcagcggcagaaagcgcacagaaggcagtggatgcctttagggtgcagtatccggaggcctcttttgcggtcggggaatgtatgaacggcgatgctttcgaactttccctggcattggtacgatacggatttaaggtgcctgagatttacggcaccatcaccgctgagaactttatttatatcaagcagctggcggctataagccctgagacgagagtttattccaacatggaaccgaccatgctgtattatgatggtgagaattcaggtgtgaatatggccattggcaaggatgcagcttattatcatcagaactgcccgaatgtcatgtggaatcaggacagacagccttatggctatgcaggggttcgcagattgtttgaggctttgacagaagcagagaatagatgggaggaacagccatgaagggattaagaaaatatctgacaccttttgcaccggatcagtcgggggctgtctccgttttgtatgaactgggcggtattcttgtgatctgtgatgcgggaggctgtgtcggtaatgtctgcggatttgatgaaccaagatggttctcaaggaaaagtgctattttcagtgccgggctgagagatatggatgccattctcggaagggatgaccggttggtagcaaagctgacatcggcagttgagaaactggatgtatcttttgcggcgatcatcggtacgccggtgccggcggtgatcggcacggattacaaggcactgggccgtatgacggagaagaagacaggacttccggtgctgaccattgatacgaatggcatggatttatatgatagaggtcaggaaaaggcctggctggcactttttaagaagtttgtggtggatgagatgcctgtggaaaagggcagagtcggcattatcggtgcaacaccgcaggatctgagtgatttatccgcaggtgaccaattacggcagatatttgcagccgatggtaaaaaggctgtttgctatggcatgggtgatggcctggatgcggtgaagcaggcagcttccgcggaatataacctggttgtttcaccatctgccctggaaacggccaaatatcttcaaaaacagttcggaacaccgtatgttgtcggttatcctttggtgaagaccatgctgccggaggctgattatacaggcaaaaaggtattaattgtgcatcagcaggtgatggcgaatgcgcttcgtgaggaattaaagatgcgcggggcatcagaagtgaaggtctgcagctggtttgatctgaaaccggaacttcgcgaagaagatgatgtttatctgaaagaggaagatgatttcacagaactggcagcggacagcaagtgggatgtggtcattgcggatgactgtatgaaatcgatgcttccgaagtttgggggacagttcatcggtatccggcattttgctgtttcaggcaaattaggaggcgcatgctgatgaatcagacagagacaagaaagattcgtgtttacggcattgtgcagggcgttgggtttcgtccgacagtgagtcggcatgcggttaaaaatgacattcacggaagcgtctgcaacaaagggccttatgtggagatttttgcacaggggacgaaagcacaggtagatggcttccttgaggatttggagaaacgaccgccgaagcgtgcggctattttgaagataaatgttgaacatcttgataataatcctgaatttgacgggtttgagattatagaaagtgaaaagacaaagggagagatttttgtttcaccggatattgccatttgtgatgaatgcaaagaggagctgtatgatccgaacaacagacgctatctgcatccttttatcaattgtacctgctgtgggccgaggctgacgatcctggatgcgctgccttatgacagagaacggaccagcatgaaggaatttccgatgtgttcggagtgtgcggaggaatacaacaatccggagtcgagacgattcgatgcccagccggtgtgctgcaatgactgcgggccggaggtttatctgatcggccgtgacgaaagaggccgtgaagcgatcacctatacgagaaaagtgatcgcctcgggcggtattgcggcgattaagggaatcggtggtttccatctctgctgtgatgccaccaatgagacagcggttgcgagacttcgtgaattgaagcgccggccgatgaaaccatttgccattatggcgcgagatatgtcggcagttcggaaggaatgtcaggtgacagaggtacaggaggaagtcctggacggccatcagaagccgattttgctgttggagcggttggacaaagctgacagtcagatctgtccgtctgtggcgccgggcaatccgaaaatcggtgtgatgctgccgtatgcgccggtacagctgttgatttttgattatgatgatggcattcagatgccggattatctggtgatgaccagcggcaacacatcaggagcgccgatttgcagagatgacaatgatgcaatcgctgaattatctcatctgtgtgattgcatgttgtctcacaatcgcaagatcaggatccgtgctgatgattcggtaatggattattacaaggatgaaccttatatgatccggcgctccagaggttatgcacctctgccggtgatggtgtcggcaccttggaaagggcaggttctggccgtgggcggagaactgaagaacagcttctgcatcggcgtggacggaagattctatctgtcgccgtatgtgggagatttggaagatctgcgaacggtgaatgcattaagagagaccattggacgtctggagacgctgcttgaagtggaaccgccggtggtggtcagtgatatgcatccaagatataattcaaccatgatcgcggaagaatcgggattgccggtgatcaaagtgcagcaccattatgcgcatattttatcctgcatggccgagaatgactgtcaggaaccggttatcggagtttcctttgacggaaccggttatggcatggacggcaccatctggggcggcgaaatccttctggcagattataaggcatttcagcggtttggatgtataacaccgttccttcagatcggcggtgatgcatcctccagggaaggatggcgagttgccgtttccatgctgtacggacagatgaaagaccgtgcagcagccatgacaatgattgagaaactgaatctgtgcagtgtacaggatgccaaagttcaaatggccatggcggacaggaagattaatgcggtgatgtccaccagtgccggcagattattcgacggtgtcagtgccattttgggaatccggaaggcttcaacatttgaaggcgaggcatccatggcattggaatttacagcggaagcgtatgagaaaaaacatcaaaacgcggttgatcttcagcatgcgatggatgagatgcggaagcaaattccgttagccgtatgcatagataataaggaatcggaatccacagaaaaaaataagccggaacaggtgaaggcagtcctgaacacagatgctttggtgaaaaccattgcggaagccagacttgcaggcgcagatacagaaaaactggcctatttcttccattggatactggcagaagaaataatagtggcctgccaaaaagccagaaaagaaagcggacggggtacagtagcattaagcggcggtgtcttccaaaatcagctgttattgaaaatggtggatgaaggactgcagaaagagggctttaaagtattgagacatcgactggtaccgccaaacgacggcggcattgcacttggtcaggcagtctacgctatgggggctttgaaaagctgattgagtgagaattataaatgaaaacaacggacacccgtccgaaacgttttcatttataattctcatcaatgcagctttatcgaagtaattccataaacagcgaataacgactgaccgaagtgcaatataaaaataggacagcagtcttagaaacaaaagaaaatagacggctgttgtcatagatttgtgataaacgcggcaaagtgttaagtggcatagctatgacaaagaccgagccagggaaaatgccgaataggaaagagaaagtttttgggtttcgagttaagaaactaaaatctatggtgttgagatttatatagctgcaaattctcaatattcttggaaaaatatataaaattaacagattcacggcaggtgcttcaacgccaccggtcttaggcattgttttttaatgccttatgtaccgctgtaggcgttggcagcgagagcggcctgcagtgaactggtaattttatatgtttttgaaaaactgggagaatttgcagcggataaacgaaaggagattttgagtatgtgtgtaggtttatcagcgaaagttgttaaaattaatgatggcgttgcaattatcgatgcgggcggcgcaaaacgtgagatttcttctcagctgattgaagatctggagccgggagattatgtcatggttcatgccggtgtggccattgccaagattacggatgaggatgacagtgaaacagatcaggtgctggaggatttattctgatgagtgaagagaagaagaaaacggcgagagagataatagaaggctatgacggaccgcctgtgaggattatggaggtgtgcggtacccatactcatgagattttcagactgggtatccgaaagctcctgccgaaacaggtagaattgatttcagggccgggatgtccggtttgtgtcacacaggttggcttcattgatgaggccgtttatctggcgttggaatgcggcgtgacaatctgtacatttggtgacctggtccgtgtgcctggaacggagatgagtcttgccggtgcgagagaagagggcgcaaaagtacgaattgtgtattccccggtggatgcagagcagtacgctaaggatcatccggaagagcaggttgtttttctggctgttggttttgagacaacgacaccggccagctgtctggctgtaagaaaggcatcggaggatggattgacgaacttcgcgctgttggtggccaataagacgatgccgggtgcttatgcagcactgaaaggcagcgcggatgttttcctttatccgggacatgtcaatgccattacaggtacggaattgtgtgaatcactggtggatgaaggcgtcagcggtgttgtggcaggttttacagccaaagaattactgacagcattggcggtggctttggttaaattccaggagggcaaaccgtttttcgtcaatgcttatccgagagtggtgacatgggaaggcagccgagaggcacagaagctggtggcagatatgatggagaactgtgatacagaatggcgcggactgggcattattccgaattcaggcctgcgtctgaaaaaagaatgggaagcctacgatgcgagaaagaagttccatgtgcctgagatgaaaggacgaagcaatccggcctgtcgatgcggggatgttcttcagggtaaatgcaagccgtcggactgcaaggtatttggcaaaggctgtacgccgcagcatccgattggtgcctgtatggtatccaatgaaggggcctgttctgcttactatcagtacagctaaaataaaaaatattataactgttcagagccaacctccaaaatgctacgcatttcgtcggtgtggcgtatccgccaaataaaatttcaaaaacagtcttaaaaatgcaagcattttatacctgttttttgaaattttgcttggctctgaacagttacaaaattctatgacatacatatgagaatcatgcaaaaggagacgtttctgatgaataataaaacagttacaatggctcacggtgccggcggcaagcagacatctgaactgattgatgaagtattcaaagcacatttttcaaatccggatctgacagcggatgacgctgctgttcttccggctccaaaaggaaagattgccatgtcaacagatggttttattgtatcgccggcctttttccctggcggcaatatcggcaaattatccatctgcggtacggtgaatgacctggcttgcatgggtgcaaaaccgttatatctttcctgtgcctttgttattgaagaaggttttccgatggagaaattggaagagatcgcaggtgcgatggagaaaacagccaaagaggccggtgttcgcattgtatccggtgatacgaaggttgccggaaagggtcaggtggacggtgtctttattacgacaacaggtgttggagaaattcttgatggtgtcagcacatccggcgactatgccaaaccgggagatgctattattgtaacaggtgatatcggccgacatggatgtacgatactgctggcaagagaagatttcggtattgatgcggatgtaaccagtgactgtgcaccattgtggcctacagtcgaatctgtattaaatgccacaaaagatgtccatgtgatccgtgatgccacaagaggcggcgttggtacagttctttatgaaatcgcaggacagagcaaggtcggtattcgcctgaatgcagcagatgtgcctgtggcaccggaagtcaagggtgtctgcggcatgcttggtcttgaaccgctttatctggcatgtgaaggccgtctggtgatcatggcgcctaagtcaaaagcagaaaagattgtcgaagtactgagacagtgtccatattcaaaggatgcggccattattggtgaagttacggaggaacagccgggacacgttgtgatgacaacagaaatcggtacacaggctttgcttcctcagccgggcggcgagctgcttccgagaatttgctaacagtcactgatcggcgagtgattgaaaattcggacggagggtcagatttttgatctggtcatagccgacaaaatggagttaatatggagaaaaaaatggaaacgagagtggcagtcattgcgattattatagaagatggcagttcagcacaggaagtgaatgaacttttacacggtgcagctcaatatattatcggacgcatgggaatcccttatcgtgacaaagggatcagtattatcagcattgcaatcgatgcgccgcaggatgtcatcagtacgttgtccggcaaaatcggccggctgaaaggtgtatccgtcaaaacggcgtattccaatgttgtttcaaaagagaattagaaccgcagtttatacaaaagttttaaacagcaaatgaaagcggagaagatagaatgattaagattgctgtatatggaaaaggcggtatcggcaaatcaaccactgtttcaaatgtggctgccgcattagcggaaaaagggctgaaagttatgcagatcggctgtgacccgaaggcggattcaaccatgcagctgagacatggtgaagccataccgactgtactggagctggtgaatcagcgcaaaaatgattttgaattagaagatatggttcgcatcggattcggcggcgtcgtctgtgtggaagcaggtggcccgacaccggggatgggctgtgccggacgcggtattattacggcactggagaagctgaaggaaaagggagcctatgaggtttatcagccggatgttgtgctttatgatgttcttggagatgttgtctgcggcggatttaccatgccgatgcgaaaaggctatgcggacaaagtatttatcgttacttcaggggaaaatatgtctatccatgctgcggcgaatattgccatggccatcgacaacttcaaaaacagaggctatgcatctctggggggtttgatcctgaatcgcagaaatgttaaacgtgaagacgaaaaagtggcggaactggcagatgattttaagacatctgtagtgggaaccttatcccgcagtgaacaggtacttctggcggaggagaagcagcagatccttctggaggcttttccggacagtgaaatggcagatgagtacaggaaactggcggagcagatactggctgtgtgtgaagcgagaggatagaaggaggccgttttatgttgaaaagactgggtggaacagtcgatccaaaaggagcggcgacggccatcaaagatgcggaatttccggtgccatttgcatcggaactggaatttaattcgccggtacatggaacatggaatatcgttcacaccggcatgcaggtgccggatgctcatcagatttatgtctgtgccgataactgcatgcgtggtgttgttttaacagcggcagagatgaacgaggcggaacgtttttcctttgttattctcaaggaagagcatttgctgaacggcaatctggaagatattaccatcgaaggtgtggcggatgtgatcgagagattggaacaaaagccgaaagcggtttttctgtttacagtttgtctgcatcatttcctgggcagcgatcttgagagaatctacgatgaactgggaaaacgatttcctgaaatctgttttgtcagatgttttatggatccgatcatgcgaaagagtggtctgacaccggatcaaaagctacgtttgtccatgtatgatcctttgaagaaaggaacagtaacagaagaagggcagcgaagaatatctatcctgggcagcgattttgcactggacgagacatcagatctcaagagattgctcagatgtaatgattatcagattaaagagtccccggtttgtgagtcctgggaagattatctttctctgtcagactgccggatgatgctgaactgttatccgtcaggaaaagccggtacggaatgggcggcagagagactggggcggccatttatgtatctgccttcctgttttgattatgatgagattatcgggcagctggaagcattatcagagtcaatggagcttctgggtgttctggattatgaaggtgaaaaagagagctgtgaagcagcacttcatgaggcacttctggaagttggagactggccgatcgccatagacgggacgtttcatccgagacctatgggattggcaagacttttgatctcccatggcttttatgtagaacggatttatctggatgccatcagccctgaagaggaaaatgatttcaaatggcttcagcagcatgcgcctgagttgatgctgcttgcaactgtgcaggtgaaaatgcgtgtccttccgagaaaaacggagcgggagatgctggcattggggcagaaagcggcctggtttacaggcagcagacattttgtcaacatggtacagggtgcgggcttgtatggctttgacggaatccggcgtctggcacatctgatggttgaggcagcccgtgaagaaaaagagacaccggatcttgtgatccgcaaaggatgggggtgcgaaagctgcatatgagacaggcatatcgaataataccgatttatacagccgatgtatccggcgtctgttcagccctctatgaattgggcggtatgacagtgatgcacgatccttcggggtgcaattcgacgtataatacccatgatgagatcagatggtatgaggaggacagtctgatctttatctcaggactgacagaaatcgatgcgatcatgggaaatgatgagaagtttatccatgatattgaggaggcagcccgtgatctgaagccgcgttttattgccctggccagttcaccgattccctatatgaacggcacggattttccggccattgcagaggtaacagagcaggatacgggtattccgacctttgcagtgcctacaaacggcatgcatgattatgtgcgcggggcaggtatggctttggaagccattgcagaacattttgttttgccgaaaagccatgcagaggatgtttcaaataaaaacacggaggaaaaaggcagaaaccgtctggtgaacttgttgggagttacgccgctggatttcgggcctcttgatcatgcggaaacgatgaagcgcagtctggagcaatacggctggcagatcaacagcatgtgggccatgggagattctttggatcagctgtcgaaatctgcagatgcagcagtgaatgtggttgtttcatctgtggggcttcgggcagccaaagtattgcagagaaaattcggtacaccttatgtggttggaacaccggttggccgtttcacggagaagttgtcagaggcaatggaagcagctgtcagtggtgaaaaggaagacaatgttgtttatgcagcctgcagaatgtcggcagagaatcttcaagatgtcaatgatgcgaaggagagtccgagccaccgggtggagatgacattgattggtgaaccggtgacaatgggctctctggcagcagccattgaacttcagtatggcagatccgttcgtgtattgtgcccgctggaagaaacagaagggttgctgacaccgggggatgaggctgtttgcggtgaagagatgatggaacaaaagctgaaggatgcaggaatcattgcggcagatccgttgtacagaccaatctgtccaaaggatgctcagttctttgaattgccgcatattgctttttcgggaagaatttatttgaagaaaataaaacagatgccgggatttgccgaccttatctaaatttaaggaggacaagagatgggattgaatgaaacaccgtcaggtgagcgtgtacatataggtttttttggccggagaaatgcgggtaaatccagcctggtcaatgctgtgacaggacaggaactggctgttgtatccgatacaaggggaaccacaacagaccctgtcagcaaggcaatggaactgcttccgatcgggccggttgtcatcatagatactccgggttttgatgatgaaggcgcacttggcgaattgcgagtccgcaaaacaagacaaattttgaataaatccgatgtggctgtgctggtggcagattgcacagagggcctgaaagactgcgacagagaattgatcgagatttttcgacagaaggagattccatggctgcttgtctggaataaatgtgatctgaagccggaacacccggaagccaaagaaaatgagatttatgtcagtgccacagagaagatagagattgaagcattaaaagagaagattgcagccatcggcaagacagaagaaaacaaactgatgctggtgggtgatctgatgcatccgggagatatggctgttcttgttattccaatcgacaaggcggcaccgaagggacgtctgattctgcctcagcagcaggttatcagggatattctggaggcggaaggcgcagctgtctgtgtcaaggaatatgaattgagggagactttggagaaattcaaggaaccgccggccattgttatcacggatagccaggtttttgcaaaggtatctgcggatgtaccggaaagtattccgttgacatctttttctattctgatggccagacataagggacttctggatacggctgttcgtgggattgccgcagtggaagatctgaaagacggagatacagtgctgatcgcagagggctgcacccatcatcgccagtgtgatgacatcggcagtgttaagataccgagatggctgaagaattacacaggcaaaaagctgaatattgagctgtgttccggcagagaatttccggaagatctgtcgaaatatgcactgattattcattgcggaggctgtatgctgaatgagcgcgaggtccgctatcggatgaaatgtgctgttgatcaggatgtgccgatcactaactacggcatcgccattgcctatatgcagggcatcttgaaaaggtctgtcagtatgtttccatatctggctgaggaattgccggattaaaatctgcagatggtgcatattttccattttcagtcatatatataagagtaaatgctgctgtggcagcgatatcgcaaaaatcaatggacgtcctgggagggtgtttctgtggcagaatatcggcgttttatttcttatatgtatttatatgaaaacgggagaaagacaatcaacagtgggtttgtgagagtagaaagccggaatggacaatgtcggctttctattcatatgtcgggaatttatcatagtgaagcgaaaaagtatcagatttatatgctgatcagagtgtctggtgattacatagggattgcaatcggagacctgttggttcagaaacagacgggggatatggaactgacgatggacagtgatcatctgatgggaacaacgtatgatctggaccgtgtcgccggtatggttttgctgggagaagatggcagtgtttacggcaccagatgggatgatgaaccgctggaaacagagaaatttgtcaatagagagccgctttcagagattttagtgagatttggagagaaaaacagtgatgcagcaaccgatgaaaccgatatggagagaacctttgcggatgcggagccggaaagtgtcataacgcaagggacagagcctgaggcagagaatctggtgagtccgcatgcggatgagaatccgttgatctctgaagaggaagtggcggcatttgtagatgacgcaaggatggaagcgtttgagaaaaatgagaatccggagaataacgagattttagctgtatcgaaagagccagagatgtcgaaagaacaagcagaagaacaggcagagcaagagctgtactctaggagcaatgtctatgacctgctgatgtcacagcttccgcagatgtatccgtttgatgatgacagtgtggcagcctgtgtccggatggaacttcaggatatcgggcgcatgccgatgccgtgttggatttatggcagcaatagttttctgctgcatggatattattgttaccggcacttgatactggcaaaggtggagcagaaaaaggataaagaagatgtcggcgggcgcggcgaaaatgatggggcgtcagaggatgaaggtgtttatctgatgggtgttcccggtatttggcagcatcgggagcaatatatggctgccatgtttggttttcgcaaattcaagccggtgagccgggaaaatcagggcagtggggcttttggttactggtgtgtggagttaaaattataattggatcggattacgggaaaacaataagacagatacggttttagagaaagggaagtggttttgtggcaacagctactggaataaagtgctctttaaaacaaaataattttcaaaaagaagttaataaaaggccagatgcgcgtctgtcggccaacagtctgttcagaaatgtttcagaagaaagtattgcacggattttggtctgttccggagcaaagttccgtacttataagaaggatgagacgatatttcgacaaggggagcaggcggattatttctatgctttattaaagggaaatgtgtcgattatcagctatatgccttctggaaaagtgaatgccttatatcatgttgcatcaggagcgttgattggagagcattacagcagcaatctggatacaaatgggcgtgtttactggtacgaagcggtggcctgcgagccggtggaagtgttggcagtgccatggcagtatctgtacggattttgcgacaaagcctgtgaccatcataagcagctgatccagaatctgtatgagagcatgtccacaaaggaatggatggcggtgcggaagctgaatgtgttagggtttgccagtgtgcaggagagagcagcagcctggcttctgcaggagacagatgcaagtgacacggtggtactaaagacaaatcgtgaggaacaggcggattatctgtgcgtagccagaccgtcactatcaagaacattgatgcagatgcagaaagcagggctgatagaagctgaccggaagcagattcggattctggatagagaaaaattggaaaaaattttgtaaaaaaaagaagtttgtaacagctgttacagacttcttttgagaatgtagatataatagtattaaatcaataataattactagttttggaaaagctacagtaacgggggattttagtcagtagataggaatgatctgagatacgctgacaacaaataaaacggaggtgtcattacatgagtatgaattttgtgaacgaaccaacaagagcatgggatcctaaaaacagacttcgggaaatgattaatgagggaagtgatgcagcgaatgtggataagctggtggaactgctgatcatggatggatttgatttttcattgactgcggatgcaatgacaccgatcgatgaggctgagcgtgttgtttccgtaggtatgggtattgcggtgaagagtgaaatgtatctgatcgagaatctggcccaggcagcaggtgcagctatgggatgttcaagacccgcttacgaaagactgaaagtacttcctagagagcgctttgtgggcatgagcggtgagaaatttaccggaacactttatattgcctgcgctatttcaggtgcacagcagcatttgaaaggtattgagaaagcacataccgttgtcgctatcaacagaaacgaaaaagcaccgattttcagacatgcggattatggtattgtcggcgatattcgaaccattctgccgcttttaacagagaaattaaacagtgatctgccaaaaccggacccaaatgctaaaccggcgaaacgggagatgccgttatactcaaagacaacagcaacagcggacggtcgctatgtctgcatgggatgcggttatgagtatgaccctgaaaaaggcgatccggaggcaggtattgaaccgggtacttcttttgaggcgctgccggaagactggatttgtccggaatgcggtgtatcaaaaagtgaaatgatttcagcagtaacaagaggatagataggagggtgaagcatgaacggtgtaagaaaagtaacggaagatttatattgggttggcgtgaatgataagcgaatcgaattatttgaaaatattcatccaattccggagggtgtttcctacaatgcatatctgttgttagatgaaaaaacggttctttttgatactgtggattggtcaggctgccgtgtattccttgagaacattgctgctgttctggatggcagaaaactggattatcttgttgtcaatcatatggaaccggatcatgcagcttctcttgaggaagtcctgattcgttatccggaatgtaaagttatcagtaacgaaaaagcatttatgtttatgcgtcagtttggttttgatgtggacggccgggaagataccgtcaaagagggcgatacaagatgcttcggcaggcatacagtgacattcctgatggcgcagatggtgcattggccggaagccatggtgacatttgatacaaccaacggcgtgctgttttcagcagatgcattcggttcctttggttcactggatggccgtctgttcgacgatgaagtgaacttcgacagagattggattgacaatgccagaagatatttcactaatattgtgggaaaatatggcccatttgtacagcagctgttagcaaaagctaaaacagcgccgatcaagatgttctgtccgctgcatggaccggtatggcgtaccaatctgggttattatctggacaagcatgataaatggagccgctatattccggaagaaaacggcgtgatgatcgtctatgcatccatgtacggcaatacagaatctgctgcccaggcactggcagcgcagctgtgtgaaaaaggcgttaccaatgtgagagtatacgatgtgtcaaagacccatgtatcctatctggtggcagaagccttcaaatacagccatattgtactggcatccgtaacttataacctgaatatttatcctgtgatggaagatttcctgcaccatctgaaggtgctgaacctgtcgaaacgtgtctttggtattattgaaaatggttcatgggccattaaatccggttcattaatggagcagtatattgatgagaatctgaaggactgcaagattctgaatgccagaatgaccatcaactcttcagccaaccgctccaatgcctcagaactggatgctctgtcagatgccatcgtgaaatctgtggctattgaagaaaaagcctttgagcagcgtgttattgatgatgcggcatttgcggaagaagaggcaagaaaggctgctttcaagaaactgtcggccaaagagagaatggcgctgatgagagagaaacacagacaggaaaagggcgaagcataggcaggaaaaggtgagtggcagaagattataaagtatttgttgttaattcggggtctacatccacaaaagtagcattatttgtgggaaaaaagaaatcttcaaactgtatacaacgtgtagaatatctattgtagtttgaaaatacatatgatataatcaaatcacacagaaataaaataatccaaatggaaaaggaacccccagaggtggcagcctctgggggttcctgcatcatgatgatgcaatatgtaggttggttgtcttatttatttccgtccaaccatttgcagataaagtatgagacaatacctgccataacggaaattataaatgaaataaaataatccacaagtttcacctcctttctgtgtcagaatggagaagacaacagggtgggtatagcatatataattttttatggtttatttttcgacaaaacatttaacagatattttggtggaggcataggatgatgaatgaacatgagtactattgctttttaaaagagttctggaaagttaccaatgacggctttatcattgtggaccccaatggtgtgattgtggatatcaacgagacgtattgcgagtttctggggaaaacccgtgaacaggttttaggaaagccaatcggcgaagtgatttcgaccaccagtatgtatgatgttctatcatcagcccgtgatggggatgataatgtttatctgcagccctatggtgaaaatgataatgccagcaatgtagaaacccatgcggtggccaatcgtttttgtttttttaatgagcagggagagcttcttggtgcggcggcccagatgtccttcaaggagagggcggcggccatggcttatagtattgccacagaagaactgaattattacaaacgtgcttatgaggaaagcagcgaagaggacagtggcttcagtaagatcctcggcaattcagaggctatgcagaagctgaaagagaaggccatgagggtggcaagaaaggattttcccgtgttgattacaggggagacgggaaccggcaaagagctttttgcgcaggcgattcatcgggagagcagcagaagaaagaaacccatcatcagtatcaattgtgcctccattccgtcagagttgttggaaagtgaactgtttggatatgacgagggtgcatttaccggagcgaaaaaaggcggcaagattggtaagtttcagctggcagacggcggaacgatttttctggatgagatcggagacctgccgttagtgctgcaggcgaaactgctgcgtgtgcttcaggagcatgagattgagaaagtaggcggcggcaagccgattcccatcgatgtgcgttttatatcggcgacaagacagaatttggcggaaatggttgaaagaggagagtttcgtgaggacctttattatcggctgaatgtggttaatattgagacgctgcccctgcgtgagcatccgacggatattctgttgtatgccaatcatgtgctgaatgcgttgaatgcgaaatataagaccggtcatttgttgtcagacagggtgaaatatctgctgatgtgttacaagtggccgggaaacgtgcgtgaattgatcaatgttattaccagtgcctatgcaacctgtgacagttacgtcattgaagaaatggaccttcccggaaggcttgtatcggggacagcgggaaatagtgtgtcacaaatgaaactgtcggaaatgatgaacctgcatgaagcagcgattatcagggatgcgctgcggcgaaacaaccagaactgtaaaaaaacagccgaggaattaggcattgacagaagccttctgtatcggaagatgcggaaagcgggtattgcgattcatcgggaaattaaatagcgtattttttcagaaccgaagtctaaatggatgtcggttctttttttgcggagagcggagactgaatcaaagtctgcacttgcatgtggacaatttgctacactatggatgatttgctacacttaaaaaaataggtaaatggcgaaaatccgctgaattcaagggattcagagcctatatgaattggcatcattgttgctctctatatacataacaggtaatgtatagatgattatgtttcaagggagggtcattatggataagaagattaagttggatgaagtgcttattggcaagaaaatggaaccgagatacatggagtataactggcgtgacattattttatatgcactggcagttggtgctcacagagaagatgtggcttatacttatgagaagtatctgaaagccattccgacatatggaaccattccttactggggaacagtgaacgtgaaaccgtatcagtggatgccgcttccggcttcgatgctggcagatgagatcattaagccgaccatttctttcctgaatatggatcatgaaatcattatgcaccgtccgattgacccgatcaagggtaccttccagtatcaggatgtcattacagatgtttatgacagaggcgagggaaagggtgccgttgttaagacgaaggtagatgtccgtgacgaggcaggcaatcttgtatgtaccaattattctacaacgtttttccatgaggccggtggatttggcggaaaaccgatgcctaagagtgaagttgtgattcctgacagagcacctgatttaacattggatgattacatcacaccggttcagaatcttctttacagattaacaggtgatacgaatctggttcatgttgattctgaatatgccagagaaatgggattcccgaaagcatttattcaaggcttatgctccttcggtttctcctgccgaatggccattgaactgctttgcccgggtgaaccggagagaatgacgaggatggctgctcagatgagaaacgttttattcccggatacaaaagttcagcttcaaatctggaagatggaagaggggaaggcttatttccgtttcgtgaatctggaagacggcaagccgattctggacagaggcgtatttgagtggaaataggacatgcgcaataaatcgcaggaggaataaggatgagttttattttgacagaagagcaggaagaattattggctttggtcagaaagttttcggaaaaagagattctgccatatgcccatcagatggatgtggaagcccattttgttccgggtttaattcagaaaattgcagatttgggatttatgggtattaatgtacctgaagaatacggcggtgtcggcgcagatgaagtgacaaaagcacttgtaattatggaatttgccaaatatgatgccagtgttgcagaattgctggcggttcatacattatccagtgacattatcttaaagcatggcacaccggagcagaaggaaaaatatctgacaaaggcatgtacaggtgcagtcggcgctttcgctttgacagaaccaaatgccggttcggatgcggccgcagcaaagacaaaggccatttctcagggggacgagtatatcattaatggttccaagtgctttatcagcaatatggggcaggatgaaggggattatgtgatattaattgttttaacggacccggagaaaaagacaaagggaatgtccgcgattattgttgatcgggatacgcctggtttcactgttccaaagacggaagataaaatgggacttcgtgcggcaccggtatcggaattgtattttgatgaatgccatgtgccaaaatcacagcttttaggtgaggaaggaaagggttttgcgattgccatggcagggcttgacggcggacgtatcggtatggcttcccaggctgtaggtctggcagaatcctgtattgcagagtctgtggaatactcgacacagcgcgtacagttcggcaaaccggtgaatgccaatcagggccttcagtggtatcttgcagatatggcaaccaagacagaggcagccaaggcactgaccctgaatgcggcagcattgcgccaggcaggcaagaatattacaaaagaagcggcgatggcgaagtattatgcatcggagacagcggttgaagtagccaataaggcgctgcagattcatggcggctatggctatatgaaagagtatgcaatagagagacagtacagagatgcacgtattattccgatttatgaaggaacttccgaagtccagaaaatggttatttcccgtgcagttatcaatggaaagtaactgtattgtgtaaaacacatactgcgatttgaaaatgcataagagataatgtctttgaagaaggatgttaagagcttcaagagaaaaagaaaaccccagaggtggtgacctctggggttttctgtattcaaaaaccaggtctgtattttacctgaattttacattttttcacagttttattttactaaactttttgtttaaaaatacttgacaacgtaaaaaattaatctataatagatttgtttagcaatatcgaacttaaagttaaggaggaatcagcgtggatataggtgcaaagattaagctgctcaggataaagaatcagctgacccttgaggagctggcgaaccgcagtgaactgacgaagggttttctttctcaggttgagaggaatctgacgtctccgtctattgcaacgctggaggatatacttgaggccctcggtacttcactgggcgaatttttttccgatgacagagatgaacgtgtggtgtttacggccaatgattattttatcaatgagcaggaggcctacgacatttcctatattgtgccgaatgctcagaagaactgcatggagccgattttgatcaggctgcatccgggatgcgaatcagagacgtacggcccttatgaggcggaggagttcggttatgtccttcagggaaaggtcgagctgcattacggaaaggcgcaatatatgctgaaaaaggggcagactttctatctgaagggagatagagaacattatctgaagaacgcaggtgaatccgaggcgaaggtgatatgggtttccaatccaccttcattttaacaaaagttagcaagaattctccttcctctacaggtgggggatgaattgcagaaaaaagaaaatagaacgcttgttctgtggtgcgaagtgtggtatactataatcagtcgaaaggatagaaaggactgattatatggacaaaatggatcataatgcacaatcacctgccaccttgttcctccggaggcctgttccacgttgcttcctgaggcagatttctgccctgtcactcccagatacttcccggaaccgacattcttgatcttatagtagccattgccttgataggtgaatacatacttcatgtagtttgaactgctcttcgctccaaggactacattggctccagaggcactgctgttcttttttgaggaaaatcccttgccgatttcagggatttttaacgcttttttctggtaattttagtgtatcataaacagtattcataagtaaccggatctgcactgtttgtcttatcacattcctggatcagattgccatctttatcatagctgtaggttgttcccggatcgccccagatctttgcattggtgcgtttgatgagctggttggaatcgttgtacttatagttatattttgctttgctgacaccatcctcgatcttctcgtaagaggtccggtttccaatcttgtcataagtataattatggactgtctttttaccgccctctgctttttctgtacagcgtgtcagttcccagttgtcatcgtattcataggtacgtgtcgtctggatctctttttcctgatgctcacagtctgctttgtctgtctctttctgtgtatcgccccagttgtaccagtcttcccagcttggcgtctttcttgttccagcttccagttccgtagctgtttctccaactacatatccctgatcattgtacttgtactcataagtactgattactttgccgcaggaaccacaggtattcacaatctttgtgatatgatcttctgcatcgtaagatacttccgtctttgttccattgcttctaatgacttctgtcacacgattcagtgcatcatgcttgtaagtggttacttttccattacggtctgttaattttaccagattatcatttaaatcgtattcatagctgacttttgtaccatccgggtatacgattgcctgcagattatttgcgtcatcataaacgtaactgacatcctttttcgaaccgcttgtcactttggtgattcttccgagcgcatcgtattcgtaactgctcttgcctgtctgatccttcatggatacccgttccccggcactgttatatgcgtaggtcacgtccttttcggatttctcaccttttgcgtcctgataagatttctccaacaggtcattcagcttatcgtaatcatacgtggttttcttgccacttgcctgtgtatgtccggtcagtctgcctttttcatcatagtcgaatttctctgttcttcctgccggatctttgatggatgtcaggttgccttccagatcataagtataattcgttgtcttatttgctgcattggtgaaggtcaccaggttatccatgttgtcgtaaccataagttgttacaccgccaagggcatcagttactttggtcaggttgtcattcttgtcatattccagatggctctttaatccggtcttatctgtaacaacctgaatattaccatgtgcatcgtaatcaaatcccgttgtaaatccacgcttgtctgtaatagaagttaccctgctgtccttatcataggtataggattccttctgccccagtgcatcggtctcttctgttacacgattgtctttatcgtagactgtctttgcaacatagcccatcgggtctgttacagatgtcacattataattcttgtcatatccatagctggtctttcttccacccggtttggtgatctcagtaatatttcctgccgggtcgtaagtataagcagttatcttaccaagcggatcagctgcagaagtcatctggcctgccaggtcataactgtaggtattgctccgtccaagtggatctgtctccttcaccagatttccatacttatcataagaaaagctggttgttccatccagtgcattggtagaagacttcatgttatggagcttatcgtaagtataagtggtggtactctttaagctgtcgctttcttttaccacgttgtccactttatcataagagaaattcttggtataacccagcggactggtcatactcttcagacgtccggctttatcataactataggtatattctccgccattcgcctgtgtcatctttgtgacattgtcattcaggtcaacactgtactgtgtctcatttccctttgcatccgttgcagaaatgacattgccatgcttgtcgtaatcgtatttggtaactgctccctttggagaaatctgttccgtcatgttactcaggctgtcatatttgtattcggtaatgagtcccatcggatcttttgatttggtaagatttccaatggcatcataacggtattcatttgtttcttttaacggagaagtctccccgatcttgcggtccagttcatcatactggtaggttgtcgtatttccatttccatctgtctgggatacgaggttgtcatttttatcgtaagtatacttggtaaccgtaccgttttcatcgacagattccgtcacattatcatttccgtcatacttaaaggtgctggatgctcccagtggatttgtctgagagataacccggtctttcttatcgtaagcgtatttatatgtagcttcctcttcttctgtcatggataactggttgccgactttatcgtaggtaaaggttgttttatgaccttccgcatccgttaccgctgtaatgcggttcataacatcatattcataagatgtggtacttccgtctgcttcagtaagtttcaggagtctgccgtactgatcgtacttgtatgttgctgtcctgccaagttcatcggtctgtgtcagtacatttccggcaccatcataagtataatccatgctgtttccaccattgtcggaggaatggatcaggttgcctgctccgtcatactgataggtaattacgagtccctgtgcatccgtacattttacaagctgtccgatggcatcgtactccatcagcaccttgtctcctgtcggcagtattatggatgtgttatttccctctttatcatacacatagctgtacgcattgccgagggcatctgtcatctttgtgctgttaccctgtgaatcgtattcgtaagtagtctttcctttcagggcgtccaccgtctgttccagattgtcggtggaatcatatttcattgctgtaatgttgccctttgcatcggttgccgatgtcatgtttccattaccatcgtaagtcatggtactggtatttccattttcatcggtagaggataccagatttccatttaagtcatacttcatggatacggtatatccaagggcatctttggatgtagtcagatttcctgccttgtcgtaagcataagtatctgttcttccctcttcatcggtagaagataccagattgcctgctttatcataagtatatgtggtagttccaccttctgggttggtttcacttaagcggtttcctgtattatcgtaggtataagtccaggttcttccactgtcatctgattttgataccagattgtctgccgcatcataagtataagtggtaactgcacctaattcatctgtctctttagcgagtcttccgcagttatcatattccttggaatggctgcttccatctccataagtaatcttggtttcatttcctaatgcgtcatattcatatttggttatattaccaactgcatctttggactgaagcacctgtccaagagaatcaaacttggatacggttgcatttccatttccatcggtatattttttcagatttcctgctttgtcatattcatagagctttgttccaaaatctttattactctcttctatgacacgtcccatgctgtcatacttataagtaattgtatttccttttgcatcggttgctttgacctgctgataattcttatcataaacgtagctgatctgatttcctttcggatctgtaccactggtcatcacataaaattcccataatatataccataagtgtattccagacatgatgttgccagtctgcctgatatgccactgttataattaacagagctatcagctcaaagatcagatctccgtacatcgttccccactgcatgcttccccagcatgaaagcagatatgcacaaaaatatgcaaatagcttttgtgtatcctcattttttggatacaggatggtattgtaacggaacacagtataaatccagaataatttacttgtcagataagtgatcaaatggatattcataatcttttcttctccgtttgtaatagtctttccctgaccttcttgcgatttgctttactgatactgagacgtgtcttgtctttcataaccacgttgtcatattcgtaatgctccacgtgttccatattgatgagataggacttgtgaatcagtaagaaatattcttctgttacatccgctacatcctttaattttcctcgatattcatattctttttccgatgtcacgatatgtactctttttcccagactataaaaatacaggatcttgtcataagaaatcttgtggattccttttgtatccgtatattcaaatattttcttccgttcttttaacagttcccgtaattcacctatcacccggaaaagttcttcctctcggattggctttacaagaaaatcaaatggatgaatacggaataatttcatagcatattcctgatatgttgaaatataggtaatccgcagttcttttccataatttttctttcgtatctccgttccgatatcaattccattctcatgttccagacaaatatcaaggaataacatatcgtaggattcttcttccagcctgttaagaagctgctccgcagaatagtatatttctatagatatctgacagtcattcgctttcccataatggagcagcttctgttctaaccaattacataggatgatgtcatcatcacagattgcaagttctagcatattttcttaccctcagtctttcgtaacacgacaaatggggaaaagaatccccttcaattcttttcccgaatggacatcactaattttgtgtcatttttccgatgcaacagcaccacttcctttgctgtcttattttgtcctctatataataaacacttgaacaagaaaaaactgtcgccattttataatttatttatattttttatgttttatttatattttatccaaatattacaacgataactaataatgtcaccccctgcattattctttttatttttagcgtcatttgataaaacatcaacgtttttgatggcaaaaagggaacctgcaaaaccagattccctttaaaatacatgctcttctctaaaaggatgataaatccaccatcctctgcttatttttaaaaactttttccttttttacaatacttataaatattaaatggtttttcttttttttcaaataaaatccctgttgttttaataatttttataagttcatccgactccatatctgtcgttttaaatataaatattttcttttcatttgttatgaaaaaaaagaagtttttatataagaacattctatcaatatttttaaattcataaatttgatcttcatctattttaattgcgttttcatcgatatccaccgtttcatatcctgatctaccccagacaaattcatgaacatttttttcaaaatttttaccaatcatttgataccaaataatccaagccacacaagccacacaagttccaatccctattccaaacatcaaataactttccgacagataacaattaatcgacagtaaaaattctacaggtgtaaaaatatagataatcattctacttttctgtcttgttttaaataattgattaggaattataaacccaagcgaaagcattctttctaattcttccctatcctcatctgacacaattgatttaatatgcattcttcttaatcccccttttgccagaggtcctctttataaaatcgaacctctggccattgtctcttttattcttttacaatttacagcgcttgaatcaacaaaccaaaaacagtacctgctccagctgaaaataaagcaataattgacggaattgcatttacaactaatgcacccgcaagaactaatattacggctcctgccagtatattactatgctcttttgtgaattctacaacattaaattcaagaccactattagaatttaatgtcattgtaaaaatcaaagcaaccgatattgtccactctttttcctcttctggcagcaaatctgatgtactaaatacaatggaaaactctacactattggcaaaaacattatttatttcaaaagcaatattaccagatttaaccgataaagcaattttttctatcgtatttccaaagttatctgctccctctatacctgtatctgataaatttgatgaaatctccataatttgatttttgcaagtttgtgtcaattctccatcatttcctatatccacttttatattataaattttaccagttgaactttcaagcgatgtggatattttagtagaaatatcaattgctccttgaggactcatcattgttcccagtgaaatttccttatcatactccacacccacatccataattttattcagataaccaagcggctccattacattatagacatattgatttcgtgctatttttacctttgcccgaagattttcttgcgctatttcctcatctgtttttgtcgatacggcatcgaactttttaaatccagtatctctccctgaatatgcatctttatccagtgggaacgaaggtgatgaagaaaatgagttcaactcacaaaattgatcaaatgcccagttcttcggcatcgaatatcccaaattacagctaaatccagttgacatatctgccacaaatgatttacttgccaatcctgcttcataaactttagtacatacatatcttggtgcataaatgccgactttataatttttatcatttgtcgaactgaaaaagatcatgtgaatctgttcaaaataaggtataataaatgtatcaatctgatatgaataacaatcaaaatccactgcaaagtatatagtcgttccacttggtataccgattctctcggctgctaaaattgctgtctgtgcatcaacacttccctgggacggatccttaaaatagtttaattcatatcctccatcctgatatatcgggaataccgataatcctgcattttcaatgtttttcacttctgttgatgtcaaatatttcggtgtatgttcttttccaacagaacctgtcagataacgtcctacatgagtataccctgcattttttatatctaatgcctgttgtttatttaatactgttgcacagtcacacgcttttgctgccctgtttgtatcgcctttactcgtaagcaatgatttcatagtagaaacatttacttttccttttgttacaagtccaattcctgtcagaccataaaactcctgaaattctgacacctttgactctgtagtcgaatcaaacacgccatcgaatcttcccggattatatccgttaaaatatagtccgtattgagcaatcttattaaatggaacatatttcgtcgagttctgtccgttctgtaatgtacccggaaacgcatttgttgttgcatcgccaaaattaactgaattcaaatctgtaattaattcagttgtaactccttcagccgcctgcaatgcaccaactaaagacaaaattgtctgtcttgaggcaattccatcacaaggtccaacaccaataacatctgaccagtcactatttaattgctgttgaataagaacaatattggaatccccaccagaaacctttgtaaaccagtttagggataacaatccagaccaaactttccaatcaattttgcccgtaacttccagtcctgcattttcctgcatctttttaactgcatttactcctgatgtataataaattccagtaattcctccagcagcatatcctttgcaaaacagagcacactgaatcaagcatacattaacctgcggagtatcattcggatccatttttgtaataatggctaacttcttcatggtattaatagtaagtggtccaaccgttcctgtaatcgttgagattccattctgaatctgaaatgcacgaatgattccctgcatcacggctgttccggtctttccatcttcatccagttttacccaatccttatgtccaccaaacatcgcatttaaatatttttgtgctgcttttacattctgatcactcatattcactacctcctaattcaagtcaattataaagatttctaactctttatatgtctatcactaaaagttacaataacaatttatcaatcaactgtgcctattttgtgactattttccaaaggattcattaactcccttataaaatccttaacaaattatgaaagaaaccatcaatttatcaccccatatcccattatagaactgtaatctactgcataatttctctgccgtacctgatcactggaatttccctcaatcgtgtaaactcttccaccttcacacttttctactattcctacatgatccgatgttccatcatgatcccagtcaaaaaagatgatcattccagctgtcggagttgttccgccactctgccacttattctttccctgaaaccaggacactccatcactgcacaatgagaatttaggaacattcccacttgcaatcagaccgctctgatccgcacaccagcttacaaaacaggcacaccattctacccgactgtcaaatccgtaccagctccagaacttctgaccgccactgtttccaagctgccccattgcaaccgacacaatctgctgattaccaaacaaaccagcaaacaggctgccaccggaataataccgcatcacatggggaacgtattggggatctccgtaactgctccatccatgcgaagctgcctgttcctgtgaaaactgcaatgcattggcttctgtataaccgcctctttgcaatgcccatcctatgtagccatttccatagttatatccctgccatgcaagtttcagcttgtccagatcctgtggactgctgcatcctgcctgtctgatacagtctgcaaaggtctgtactccaacctctatcgaataatccggatcagtaatagaaccaggagtgtgtgggaatcttgtattatatggactttccgaacactgcatcgggtctgttcccctgcctccagattcctgcatcatgatggcctgtatcgcagacacatattccggaatgccgtattgggatgcatactgctgtatcacagaagtatacgcaagcacttcttcacttagggattcggagctttccgaattactgctgaaagctgctcctgcaatgattcccacaatcagaataaataccagaagaaatgcactacctccggcagcaatccattttcccattttttcaagagctactacccctttttgaatcgctgctgtaattccctgtacggataactttgaaccctttccagttacctgaaggactgcttttccactttctgccgatgcctgtgctgactttcttgccatctgggctgctcttgctttctgcatcgcctgaagacttttttccatctgctgtttctgcatggatgcctgtgtctttattttttcttgagacagaccggatacttttaccactctcggtgctgctttcacctgccgtttaccattctccttggcaagtgctgcctgctccggtttcaacttgattaatttctttccgctttctgccccctgctccattgcttcttcggcagctttcgcttcttcctgtctgctttttctttcctttatcttcctgtaggtcactccagcaagtttttttccaccttgatatgtggttttccctatactttttcctgccacactcgccgctctgtactgtacggattctattttttcagttccatactgtgttggggattctgactgcccactgcttttttcatgtagttcccttggcttttcttttgcttccagaaccgctgagcgaaccagttctttcggaagtcgggcagccggatttcgaatcttcggattcttatcccttacccgttccttgatatctttcatccggtcaccctctttccgtatctcttatctcatcgggcaacatcccgatgtttctttttttcctgctgtttctgcaactgctccacctgtctgattgcctcatttaccagtggatgttcgttgtaatatggcacaagttccaagtctcccctgtcttttgatgacaacggtaatggatattccatgtctgaataaattgattctggatcatgaatagaaaactcaatagccggacacatattggcagatgttctacaatatttctggtactttttatatgcctcttccagcgttctgcattttgtatattctcctaaatcatggaactcaccgcactctgcagcataaaaagttatcgttacttcttcttttttcttcattatgattctcccggttttgttgtcattagtttataaaggtctgtattctttgggaacgtattctcaaatggtacgatattcccagagcaacggattaggccactgccaaccgatacatttgtaatataggacagttggttttcggaaatattcaaaagagctgccaattcttccctgtctgtacttgcctgattcaaaagaatcaaaaactcactgtttgccaacatcagtcttgcagtgtccgatttcagaagttcctcaacattttgggttaaacctgtcacgaatccattgtattttctgattctcttgtacagtcggtagaagaaatttgcactgtattcatagcggaataacagatagaactcatcggcaaatatccatgtcgtttttccttctttccagttctgaattaccctgttgaaaatactgtctaaggtaaccagcattcccagtggcataagctgttcccccagttcccggatatcataatccatgatcctgttcttcttattcacattggtcggctgtgcaaaggtgttcaggcttccattgataaaaagttcggatgacagtgcaagtccccttgcctcttcttccggctgtaacatcaactgtcggtacatatctttcaatgtcggaacttctccggtataaccacttcggatataatcccggtacacatctgcagcacagcggtccaggattgacttttcttttgctgacaggtttcctgctccaaccaactgttcaaatacagacagaataaactccgatttttcaatcagtggattcttttcattgccgtaggctgcgtccatatccattgcattcaggtgattgtctgatgtcgcagatacttttacaacctgtccacccagagcctctactaattttgtgaattcggactccggatcaagaatcaggatatcgtcatcggtactcaatgccagatgcacaatctcttcttttgccgaaaagctctttcctgatccactgacgcccaaccggaaactgtttccattcatcagtttcttccggtcggctaccagaaggttcttgctgactgcattctgcccataatagataccgcccggctgcaggatttcctgtgtatggaacgggattaaaacagccgttgattccgttgtcaatgtacgcagggcattgatctttcgcagtccgtaaggaagcactgtattgagtccgtccacttgctgccactttaatgttgccatctggcacagatgctttcttgctatcgacaataataattccgtatcggaatccaactgttttttactgtctgccagatgtaccattgtcaaaattccgaacatcatacgctggtctctggttgtcagatcatcgagcatttccttggtttcttttctctgaagttccatatcgtatggtacgattgccgagaagttattattagcgttctgccttctctgccagttggtcacgttggtttccacaccaagcagtcggttctggatttcccttaccgcttcatccgtagggactggcaggatatcaatcgacaatatcagattccggctgaagtcacacagttctgaaatcatgtcatctttaacataacttgcataatcctgcatatacaggactcttccgtacctgtcaccgattttaaaatggtcacgttcaaattccatagaatccggacacatccagtccttgaaacttgttcccttcttggcaaattgtttcagatcaaacggaaatgcctgtgggacatctcccttgaagaagtccctgaaaatctggagccggctctctgcgtccagtccttctgctgtggacgataactttgccagatgtgttacgatgtctgttccgatacgtgcaaaataggttcttgcatcgtcaatcgatcttttatgtacactgacagtcagataccgttcctgatagatgctgttgtttgttcctgtaatcttagacaggagcatttcgttgtattcttcccgatagtggtccagtccatcttccttcattggaagcaggattgatttttcaaattcttctttattgattctccggttattgatggtaattttggcagaaatgccggaatccagtgaatttaagagttcggaataatccagaaacatttctgtcttattgtccttactcgcaatataatagttgatatctgtaaaacgatatgtttttgagaatttcgttccctgttgaaaaattccatccggccagattcgctggatgggaattgcctgttggactgatttcggaactttgaagcgttccttatccatccgaagtgcctgacttaaggttttaatcaaaggcatcactccttcccttgcgtttctttctctgttttgcttctgctctttgctcccgctcttttatgatttccgctccatccttttgattcttttctcccagcgagatggtctcctgcatgcaggagtagtggatatcttccgactgaaacaccagtttcttcggatacagcaattcggatttgatcactgcccataaaaactgttcggctgtcataccatgatatttgaaaaagccacaggcagcaaatggagtagcaccaagcacacacagccatccggttatttcctgtccggtaatttcacgcattccaaagtaaattccgattgctgtaagaatcgcaagaacagaacacacacattgtctcaggtccagtcccataaacatggattcctgatagtcccggatttctttattcatcttgacttccataacttatcgctcctttcctctgctttgtttcttcgttttctgtggtttttctttcggtacttctatcccggcaaatctacagtgttctgcaacgccttccggatcaaattccgcaagtcttgctagatcaaacgctaccttctgataggttgcatatcctgatcttcctgtttcattcaacacttttcctagtttatgttccttgataaaatgaagcatatccttggtaaaatctcctgttataaaagcctcatttggctctaagaactgatagggcagattaatggttacatctccaaaatcttcccattctctcccttccttatggcagagtcctacatataaatttccattgttccgataagagctcactcgtattgctactgtctcacgtccaaattcccagttatatcttaatgttttctttatatccatatttttaacctccaagtcccatcatttctctgacaatacggtcagatgccttaattgctccaaccagcaccagtaaattaaataccagttctccgacatagttccacacgattgtaactgcactcaactccgtatctccgacagccggagggcttgctgcataagcagaaaagataatacatgccagtgcaataattgccccttccagacatacgcctacataagaacggataaagttctttccaatggactgcgtgggttctcctgcaaatgaggaaatcggaatcggggcgattgccgtatacatatagattttgaacattctgccatacactgtcaggatcattacaaatgacaatacagtgatcagcagactgccaagcagtgtaacaatccacaacggaatggattccagcattcccacgctctcaatcttatctacaatctccgttggcagttccgtcacgcttcctgccatactggagccactcattacggttgtcacgattccctgcacaatggaaaacagtgcctgcataagttccatcccgtatgtaattgctccctgagcaagtgcaaaccggataaatgcttttagcacatgttccggctttttcagatctgtaaaactgccacacgttttaatgattccggctgcgaaaaataataccagtaatccataagcaatggctgtcagtgcatcattaatatttaccataatccgccagatgccgccgcccttaaaagttgccggattttcggtcagcagagtccacagttctgccatcttttcactccatgtggatagtgctgagtttagattctgtacaatccagttatcactcaaaaactctcacctccttaaacatatttttgaatacaggagtaccttccggcactcctgctgtttcctgatatattttttcaaagaggcttacgccataatcaaatcgaggatttctttggcgaacgtaataattacccctccggccagtgtcagaaatccatttgccctctggcttggatcatggctttttaaagacagaccaacctgcacaacaccaaatccaagcaaaatcaaaccgatcgcacgaatcagagaaaaaataaaggtagacaggttattgataacggacaacggatctccggctgcgaatgcggtcgttgctccaaccgttacggtcagtaccagtgccatataaaggctcatccactttttctgttttctccccatcggcatcggggttatcattttttcagttgtattcttttttgttctatttttttctcctgtgagaagtttcttcaatacacatcactccaatccatcaaaaaactgctattcaccaaggatgtcctcggtagacagcagttcgtaatcgtctaatctgttaatgtcaatctttaggtcgtcgtgagccagtggtgttttcgcataatcataaggcgatgcaccaccgtcctctgtgtatctgaaattcacatgcttttttaaatcatatttatcgtccatgatcggacgctccccacgaataaacaaaatcgctttgcggttatctaaaagccgtatttcatccggtgttaaaagttcccttcctgtctgctgataattcaccgaatagctgccgctacgcccttttgtctgtccgtaggtattggtatccaatgtctcttttcccaataattccgagacatacttatgtccttctttttcatttccacccagatataaaaattcatcgcagttgccgatcagactctcatacgagtctttaaataaggctttcatctgtgcaatgttctggatgatgatactgcaggaaatccctctggaacgcatggttgccagaatcttgtcaaaatcatccggcaaggctacgtttggccattcatccataatgcagtgtaccggaatcggaagccttcctccgtacttccgatctgccacataatacagtgtctgaaacagattactgtaaatcatgccgaccagataattcatgctggtgtctgcatccggaatacagcaaaacagtgctacttttttctccccaatactgtataagtccagttcgtccgtacaggtcaggttggcgatttgtttcagattgaacgctgccagacggacaccaaccgatatcaaaatagactttgcggtctttccggccgcctgcttataaatggcatactgcttgaccgcaatactctctgggtcccgcatttccagtctttcaaacaaaatgtccaatggtgactggtaatcctcatcatcttctttgacctgtgcgcttccaagcatttccatgatcatcggaaagttctgttcttccggtggagcttcatgcaataaatacagcataagtgcctgtaaaagtgcagtctcggacttctcccagaacgggtctgagctctgcgctcccttcggtgttgtgttgcggatcaggttattgatcagcttcagtacatccttatcatcccggacatacgcaaacggattataacaccaggaagtctccggattgatcaaatcaaaaacccggacttcatatccattccgttccaggacacctccggttttacgcaaaagttctgccttgggatcagtaatcaccatcgaacagttgcactgcatgatgtttgggattgcatacgtccggctctttcctgctcctgaacctccgactaccagcacatttaaatttcgtttgtgcttataaccgtccagtcccatacggaaatgctgtgttaaaagcagattttgcgtgtattgtttttcgcagtaacgtctgcagatttcggacacgttgccccattttgcggaaccatgttccacgcctcttctataatttcttttttgggattcataaataccaatgcctaagaaataggctgctgtgaatatcagaatacatttgaacgtatacggtgtatacgtgataaaaaacggctgttcgagtttttcgctcagcgtttctaagatttgaataaaattattatccggtgtaatggcacaagcggtaatcgctgccgcccaccagataaatggcagaaagacaagatacagaatccagtcctgcttttttgtacttatctctgcaagtcagattctcttttcttgcgtggcttttcttctggatgtccctgtccttctttcttatgaaaggaagccactcccggtatcagtgagagacttctgccgttgtcccacttaacaccaagctggcctgcatcatccacatactgcacagttccttccagtccctgcggcatacccgcttctccatccatcgaattcagacagatttttgttcctgccggatactgttctctaagtcttgccactttttctcttgaataaatgaccaatcaaccactcctttctctaccagaacatgtgtctgctagtattcggttttgcaacctggataataactttatctattccatcgctgtatcttccggctgcaagatatttacttctgagtctgttcagtgccttacggatctgcctttgttccccggctgtaatctgcagtcgtttctgagcgaggtcgtattcacttacttttttcagaagagctttcgtttcttccaaacattcatcctgctcactctgtgcctgtagctcatcattcagtgccaccacgaacatatttttcataatgttatccatcttcaaatagtattttgtcatctggctgacctcctttttttgttacaccaaccatatcacaagacctccgtaatagctactccaaccgtccaactttttcacttttatcgttccggctggctctttgcttttttctcttttccggatgctttttcagatggtttttcatccttggtttccggtatttttacagggtctccgattgcgaactcatcggttatatactcctgttcctttgcaccaaaattgcgttcgatatggtttcgtatactgtaggaagcctgacggacatcatttaaaaagtctctcagttcctgcggatctttctttccgcattcattcctctgtgcaatatactccagattgaatccggtgacatccacaccataacgtttcgcaatcacataggctgcacaataagcctgtgcactgactttctgtcggctgtaggttccggtatgctggtccagtgctgcacacgccagttctctgttcagtgcatggaatgtcgttacttcactcattccgttgcggatataaatggtacggtatcttggattgtactgggcctgcactttgtctggcagattatcctcaatctgcacacgtaccgactggtcttttaagacagctcctaccagttctgtcaggcttcgctgagggcgttcttccaatggcttccctgtcatctggctgatgtcaaatccttttccgatcgtataccctctccgcatttctccatctttttcatattcagtggaaatcatataagtaatgccatgctcccctgcttttaccgaacggtgttcttctctccagcgttcataagaccttaccaccttaaaatccggatgctgtccatagatcaaaagcagattcggtgttctctgggtattacactctgccataaaatccagaaaacctttcagtttttctccatcctgaaaaactccctgtgcctgtgaatctacttcagcccatacctcttctctttcctgctgttttttgactgcatattcttccttggtcaatttctgttcaggaatctgctgttcttccgttccacctgaaatcatatctgttaaatccatatacattacctgcctttcgttttcatattcttacgtttcttcctgctctctctggcatttttccgtctgtccggcctcttacgtttctcttcctgttccttacggatatctccgagttctttccgcacagatggtttttcattcttttcttcccagctagtttcccgaccggaagaaatatttttgttgcgcgagaaaggttcggacggattctttgctttcccctcctgcgcatgtgtaaaatttccttccgggaaagcctcatccccgatctggaacatttcttccgcatcatccagttcaaattctatcttgccttccggcaggacaacggtctctgtccgtacattctccccggtttctttttccatctggttctctgccttttccggtgcagtctctttctccactgcttctgtaaccatagaacctgattctgcttttacaaaatccagattcatccggtctaatacccggttcatcttcgctgcatcatctgcaaataccatgacttctgtctggtccggattcaccttatctttgataactacatataagataccccttgccttggcctcttttgcaaattcttttaagcggtcacccggaacggtaaaaaatttcatcgggcgctgttcctttaacattctggtaatccttgttttccctcttgtctttttctgatctttcagggcggccgcaataaagattgccacatgctttgccacatttccggtaatcttcaaagagtattccattccttccagactgtaccgcaccacctgatcagccggttctgctccgtaattcatacttatctcacctcctgactctctttttctttgtgttccacacgtttctcattctggttttgttcttctgcctttcgaagtctttcttcgatttccaatgaatgcttttcaatccggacggtcatacggacttcttttcggagattttttaattcctcattgatttcggacagccgtacttttccactgtcttcactgtcattccgatagagctttctgcgttccttcatcagttctgaaatctgcttttgtaacggctcacggtatgtggcaagctgttctctggtcgtaatgtcatgcttcattaaaaactcaatctgttcaatcctctgatccagtttccggatatcctctctgatggcatacggacttcttctcggtctttttggcagtactcccatctgatatagataggaataatataatgcctgtatcccggtcagtttcttctttggatgaatctgtactgccttttgatagacacgtttcaccttcggctgtagtatctgcccacgtatttcctcttcggaatagttttttccaagagaacgcagacggatataccgttccatccccggagcttttaaagagatgtattttcggttcagtttccatgtataccccctcttttccatctcttttaggaattgtgaccaggagtagctttcctgtaccgattccctgatatccaaacggatcgccgttctccatgtcggctttccttcctgttctgctttccactgtacataagggattgattttttctgattggattcaatgatagacagaccatattttctgcacaaatcatcggaaatcttgcggatctccgtataataactcttggcattactatggtacttatgtccgtccaccatgcttacagaattccagacaatatgattatgataatgtctggtattaagatgtgttgtgataactacttcaaattgtccttttaagagccggtctgccagttcctgcccgatgagatgtgccagttccggtgtcacctcaccttccgcaaaactctgtaccagatggtatccttccacaccgcctatcttatggaatctcttttttgttgccaccatatcttcatacgcattttcattggtacatccgatggtatcttcgaagaccgcctgttccgtctttgtccggttcatggcataatcaatggcagcctccagagagtctgctttctgtgtggttttttctttgtctttcacatattcgatggaacggtccaggcggtggacggggataacacttgtataagccatctgtcattaccactcttcctttaccagatgccatgtctctttggtaagccggagcatttcctgcacactctgctcacttgccattcccgaagcattcgcaacatgggcaagctggttcgcattattgcacagacccgctatcttcctaagcagttccggatgatgttcacaaggttttgcgtgtacctgtgctcctaagatcagcgaacgcataaactcttcccggctcagtccgcttttttccacctgttcctccaattccctgagttcccttgcatttaaccgcaccgggatcacatggtttcgttttcgcattgcatcaccgtcccttctcttttctctttcatcatatcgccaagctcctgatccgaccgtttcgcagtcaccatacagcaggtcaccacgactccgaaacaacctccacacatcaatgcgatcataatcatgactccgtctcttaacatagcttatccttcctttccgttttcattttgtattcgggggattggggttctccccaaagtgcgtttggatatccaaacgctatgcttgcaaaacgagtaccgccagtttctgtagcaccggattgactcgattctgatttattttgattcttttatctgtaccagtccatcaagtgtcgtacaaatgatatggagtctgtctgccatactgatttcggtattcattgttcctgtcacttctttcccacatacgactaccatccggcatctccgtaaaaggatatgggacattcttccatatccttgcatatcttctgcatcagactcttccaagaatggtgagaatacaaatctcggacagatcggtacatacccaagttcatagatttttctgcaatatttctgcacttttacccggctttcttctgctgaacagcacacataagccagcgcctgttccatacgctccatctccttcctgcatccagttggatgccactcattttctctataaaaaacaagatgtccaattggacatcccggctacttttcatcctctttctgctctgcttctaatgcaattttcactctgtcacttcccagtttgtagtaggcatctgttacctcaattcccactgcacgataacctgtcataaccgctgcaaggacagttgttcctgctccggcaaacgggtccaggatcagccctcccggttcacaaatctggatgacatctttcataagctgcaacggtttctctgtcacatgaatccggttctgcggattgccatatcggaagacgcccggcagacaagataccggacgattgatcggcatcggtccgttactgccccacacaatatattcagcctgctggcggaaacggcctttctgtggacgggagtttcccttatcccacaccgctgttcctcgccagatccatcctgcccactgcaatgcatcggtaatcgatggatactgacgccagtcaatgaacaaacagattggagcacctttcttgcaggctttccgcacatcatagagccattcagccatccagtgcgtccaagatctctggtctttgttatccccatcgaaatccggaagtgcattggcagcactcatactgctgtatttctgatttgtagtacgatttctttcattctgttttgttccaccggatgcatacggcggatcggtaataactgcatcaaagattcccggctggaatgctttgaccagttttaatgtatctccatgtaatattttccagttttccccttcagtatattcctccgggtatgtttcctctttcataagttcttccaaactcaggccatttgtcataggcatcatcctttcttttctcagcgttcaggctgatttttcttctttgtttgtcttttctggtaggactgtggcggtttcagtttctcagg
